(19) United States
(12) Patent Application Publication
(10) Pub. No.: US 2003/0211476 A1
(43) Pub. Date: Nov. 13, 2003

(54) Genetic analysis of peyer's patches and M cells and methods and compositions targeting peyer's patches and M cell receptors

(76) Inventors: Daniel O'Mahony, Blackrock (IE); David Brayden, Glenageary (IE); Daragh Byrne, Baumont (IE); Imelda Lambkin, Sutton (IE); Lia Higgins, Donabate (IE)

Correspondence Address: CAESAR, RIVISE, BERNSTEIN, COHEN & POKOTILOW, LTD., ATTN: ELAN, 12TH FLOOR, SEVEN PENN CENTER, 1635 MARKET STREET, PHILADELPHIA, PA, 19103-2212, US

(21) Appl. No.: 10/116,275

(22) Filed: Apr. 4, 2002

Related U.S. Application Data
(60) Provisional application No. 60/281,387, filed on Apr. 4, 2001.
(60) Provisional application No. 60/302,591, filed on Jul. 2, 2001.

(51) Int. Cl. C12Q 1/68

(52) U.S. Cl. 435/6

(57) ABSTRACT

Methods of increasing of or decreasing the levels of a protein in a PP cell; methods of increasing antigen, vaccine, DNA vaccine delivery to M cells, use of human serum albumin and other transport enhancing proteins to enhance oral drug delivery; use of calreticulin to enhance oral antigen delivery, use of other cell surface proteins, receptors, and transporters to enhance delivery to M cells of antigens or vaccine delivery vehicles, use of other cytoplasmic proteins to regulate intracellular trafficking and delivery to mucosal immune sampling and processing systems.

### CROSS REFERENCE TO RELATED APPLICATIONS

[0001] This application claims the benefit of U.S. provisional application No. 60/281,387 filed Apr. 4, 2001, and U.S. provisional application No. 60/302,591 filed Jul. 2, 2001.

### FIELD OF THE INVENTION

[0002] This invention relates to the genetic analysis of M cells and methods and compositions targeting M cell receptors.

### BACKGROUND OF THE INVENTION

[0003] The Peyer's patch of the intestinal lining is a specialized tissue that allows the immune system to identify foreign antigens that require an immune response. It is also a potential pathway for orally delivered drugs to cross the intestinal barrier into the bloodstream. Central to these properties are M cells, which populate the patch's epithelial sheet. In view of the importance of the Peyer's patch and its M cells for the immune response and drug delivery, it is desirable to identify the cell proteins important for these phenomena. It is also desirable to increase the amounts of such important proteins in order to either facilitate the immune response and drug delivery or promote the conversion of non-M cells to M cells.

[0004] Similarly, it is important to identify and further decrease the levels of proteins whose absence or down-regulation in expression facilitates the immune response and drug delivery, or promotes the conversion of non-M cells to M cells.

### BRIEF SUMMARY OF THE INVENTION

[0005] Increasing the Levels of a Protein or Antigen-Protein Combination

[0006] In a first general aspect, the invention is a method of increasing the levels of a protein in a Peyer's patch cell, said method comprising delivering to said cell a nucleic acid coding for a protein, wherein absent said increase, the levels of said protein or its mRNA is greater than in a non-Peyer's patch cell.

[0007] Peyer's patch cells of particular interest are M cells. The levels of a protein or its mRNA in Caco-2 cells co-cultured with Raji B cells are considered herein to be representative of such levels in a human Peyer's patch M cell. Monoculture Caco-2 cells are considered herein to be an appropriate non-Peyer's patch cell for purposes of comparison of such protein or mRNA levels.

[0008] The levels of a protein or its mRNA in rat Peyer's patch epithelial cells can be compared to their respective levels in a culture of rat normal gut epithelial cells. Absent evidence to the contrary, results of rat cells are assumed to be predictive of the results in human cells.

[0009] The presence of Increased levels of an mRNA, and therefore presumptively its protein, are indicated in the Table 2 and 3 by a ** a *, or an expression Fold Change greater than 1.00. Preferred are those indicated by a ** or an expression Fold Change greater than 2.00. Most highly preferred are those indicated by a **. The presence of decreased levels of an mRNA, and presumptively its protein, are indicated by a minus sign (−) or an expression Fold Change less than 1.00. Preferred targets are those indicated by a minus sign or an expression Fold Change less than 0.50.

[0010] In embodiments of particular interest, the protein is a receptor, a transporter, cell surface antigen, or cell adhesion molecule, especially a receptor. In other embodiments of particular interest, the protein is selected from the group consisting of nucleoside diphosphate kinases and member of the 14-3-3 family.

[0011] In the methods of greatest interest, the nucleic acid is delivered to a human cell. There are many delivery options, one of which is to deliver it by the oral route with the cell in a human, another to deliver it to a cell outside a human.

[0012] In an important variation of the method, a nucleic acid coding for a tumor antigen or foreign peptide is also delivered to the Peyer's patch cell. The purpose of this aspect of the invention is to improve the immune response to a tumor antigen or the foreign peptide. Normally, therefore, the foreign peptide will be that of a virus or infectious microorganism. A tumor antigen is one that is more abundant in a tumor cell than its normal counterpart.

[0013] Decreasing the Levels of a Protein

[0014] Another general aspect of the invention is a method of decreasing the levels of a protein in a Peyer's patch cell, said method comprising delivering to said cell an anti-sense nucleic acid molecule, a ribozyme nucleic acid molecule, an RNA interference (RNAi) nucleic acid molecule, said anti-sense, ribozyme or RNAi nucleic acid being complementary to a sequence of at least 10 nucleotides of the mRNA for said protein, wherein absent said anti-sense nucleic acid molecule, ribozyme or RNAi nucleic acid, the levels of said protein or its mRNA are less than in a non-Peyer's patch cell. More preferably the anti-sense nucleic acid is complementary to a sequence of at least 15 nucleotides of the mRNA of the protein, and most preferably to a sequence of at least 30 nucleotides of the mRNA of the protein. It is preferred that the protein is coded for by a gene with an expression Fold Change denoted by a minus sign (−) or an expression Fold Change less than 0.50.

[0015] In a particular embodiment, the latter method comprises delivering to said cell an anti-sense nucleic acid molecules, a ribozyme or RNAi nucleic acid molecules, said anti-sense, ribozyme or RNAi nucleic acid being complementary to a sequence of at least 10 nucleotides of the mRNA for at least 5 different proteins, wherein absent said anti-sense, ribozyme or RNAi nucleic acid molecule, the levels of each of said proteins or its mRNA are less than in a non-Peyer's patch cell.

[0016] Alternatively described, the latter invention is a method of deceasing the levels of a protein in a Peyer's patch cell, said method comprising delivering to said cell an anti-sense nucleic acid molecule, ribozyme or RNAi nucleic acid molecules, said anti-sense, ribozyme or RNAi nucleic acid forming a double-stranded molecule with part or all of the mRNA for said protein, wherein absent said anti-sense, ribozyme or RNAi nucleic acid molecule, the levels of said protein or its mRNA are less than in a non-Peyer's patch cell.

[0017] Cells of the Invention

[0018] A human or rat cell to which any of the above methods in this Brief Summary of the Invention section has been applied, or the progeny of said cell, is also an aspect of the present invention.

[0019] Delivery Enhancement using a Targeting Ligand which Targets a Receptor, a Transporter or a Cell-Surface Molecule Expressed on Surface of M Cells or Pever's Patch Tissue Cells

[0020] In another general aspect, the invention is a method of targeting an antigen or a drug delivery vehicle containing an antigen, or a drug delivery vehicle containing an antigen and adjuvant, or a drug delivery vehicle containing a drug, or a viral vector, or a bacterio-phage vector such as, but without limitation M13 or Fd, or a bacterial vector or a gene delivery vector expressing an antigen of interest, or a viral vector, or a bacterio-phage vector such as, but without limitation M13 or Fd, or a bacterial vector or a gene delivery vector expressing a gene product(s) to M cells of Peyer's patch tissue, by targeted delivery to receptors, or to transporters or to other cell surface proteins which are found to be expressed on the cell surface of M cells or other cells found within Peyer's patch tissue, or which are found to be differentially expressed on these cells. Said gene product(s) coded by the viral vector, or a bacterio-phage vector such as, but without limitation M13 or Fd, or a bacterial vector or a gene delivery vector regulate the function of Peyer's patch cells to M cell phenotype or regulate M cell function to increase their immuno-surveillance or antigen presentation to the mucosal immune system.

[0021] In one embodiment, a phage display library such as M13 or Fd which express random peptide sequences on the surface of the phage, coded by example gene III or gene VII of M13 or Fd bacteriophage, can be screened by in vivo panning against example Peyer's patch tissue found in vivo in the GIT, in order to discover and identify phage or targeting ligands which specifically target M cells or Peyer's patch tissue in vivo in the GIT; such phage which target M cells and Peyer's patch tissue can subsequently be genetically engineered to encode a gene or genes of interest such as a DNA vaccine gene, a gene coding for an antigen of interest together with gene(s) which modify M cell function and which enhance the immuno-responsiveness of the M cells to the antigen or DNA vaccine product coded by the genetically engineered bacteriophage genome.

[0022] Delivery Enhancement using Transport Enhancing Proteins

[0023] Another invention disclosed herein is a method for enhancing transport of a drug through the gastrointestinal tract, said method comprising orally administering said drug in a composition that comprises a transport-enhancing protein, said transport-enhancing protein selected from the group consisting of human serum albumin (HSA), clusterin, T-cell surface glycoprotein CD5 precursor, HSP84, and Ca²⁺-dependant phospholipase A₂ (Ca2+ pla2), or a homolog that has at least 80% amino acid identity with said transport-enhancing protein over a length of said transport-enhancing protein identical to the homolog. In a preferred embodiment, the homolog has at least 90% amino acid identity with the transport-enhancing protein over a length of the transport-enhancing protein identical to the homolog. In a more preferred embodiment, the transport-enhancing protein is selected from the group consisting of human serum albumin (HSA), clusterin, T-cell surface glycoprotein CD5 precursor, HSP84, and Ca2+ pla2.

[0024] Method of Delivering a Vaccine to a Target Cell

[0025] Further invention disclosed herein is a method of delivering a vaccine to a target cell, said method comprising utilizing as the target cell a Peyer's patch cell in which a protein or mRNA is upregulated.

[0026] Method of Decreasing the Levels of a Protein

[0027] Yet, another invention disclosed herein is a method of decreasing the levels of a protein in a Peyer's patch cell, said method comprising delivering to said cell a DNA molecule coding for an anti-sense nucleic acid molecule, a ribozyme nucleic acid molecule, an RNA interference nucleic acid molecule (RNAi), said anti-sense molecule, ribozyme or RNAi nucleic acid being complementary to a sequence of at least 10 nucleotides of the mRNA for said protein, wherein absent said anti-sense molecule, ribozyme or RNAi nucleic acid, the levels of said protein or its mRNA is less than in a non-Peyer's patch cell.

[0028] Method of Increasing the Extent to which the Function of a Protein is Carried Out

[0029] Another invention disclosed herein is a method of increasing the extent to which the function of a protein is carried out in a Peyer's patch cell, said method comprising delivering to said cell a nucleic acid coding for said protein, wherein absent said delivery, the level of said protein or its mRNA is greater in said cell than in a non-Peyer's patch cell.

[0030] Chimeric Protein that Comprises Two or More Segments, each of said Segments Enhancing a Different Step in the Peptide Transport Process

[0031] Another invention disclosed herein is a chimeric protein that comprises two or more segments, each of said segments enhancing a different step in the peptide transport process, said steps selected from the group consisting of binding to a cell such as an M cell, transporting the peptide into the cell such as an M cell, presenting the chimeric protein to a protein processing pathway within a cell such as an M cell in order to maximise processing in a way to optimize presentation of the processed chimeric peptides to epitopes suitable for immune activation, transporting the peptide through the cell such as an M cell, and transporting the peptide out of the cell such as an M cell to an underlying immune cell such as a B-cell or T-cell.

[0032] Delivery Enhancement using Calreticulin and other Proteins

[0033] Another method disclosed herein is a method to facilitate intracellular trafficking of an antigen that has been orally delivered by itself or as part of a composition or particle, said method comprising administering calreticulin.

[0034] Related to the latter invention is a chimeric protein comprising the amino acid sequences for (1) calreticulin, rab family proteins and and/or a ribosomal protein, and (2) a second polypeptide. Also related is a method of administering a polypeptide, where said polypeptide is part of the chimeric protein and wherein said chimeric protein is orally administered.

### DETAILED DESCRIPTION OF THE INVENTION

[0035] The present invention and the related research were intended to improve targeted vaccine delivery and targeted gene delivery methods, especially as they relate to Peyer's patch cells. In significant part, this was achieved by identifying proteins whose up-regulation or down-regulation would indicate their possible or probable role in cellular functions important to vaccine and or drug delivery. In some cases, such as receptors, the proteins are important from the point of view of cell specificity during the delivery process. In many cases, the proteins have functions that are important after the vaccine or drug enter the cell.

[0036] Closely related to those inventions and research goals, was the concept that in M cells there would be proteins that, as compared to M cell precursors, were up-regulated or down-regulated. The identification of such proteins provides a strategy for altering M cell precursors so as to shift their phenotype toward that of M cells.

[0037] As indicated, one aim of the research related to the present invention was to determine if there were detectable differences in protein/gene expression between: (1) Peyer's patch (PP) and non-Peyer's patch (NPP) rat gastrointestinal tract (GIT) tissue and (2) M cell enriched follicle-associated epithelium of Peyer's patch (PP FAE) tissue. This was done with a view to finding novel or highly expressed ligand targeting sites on the Peyer's patch or M cells as well as other protein relevant to the delivery of drugs across the GIT.

[0038] This invention is based in part on the discovery of over-expression of a range of genes in Peyer's patch (PP) tissue from rat small intestine in comparison to normal non-Peyer's patch (NPP) small intestine tissue.

[0039] This invention is also based on the discovery of over-expressed genes in co-cultures of Caco-2 cells. The idea was to use genetic mapping of the M cell co-culture, e.g. Caco-2 cells co-cultured with Raji cells versus a monolayer of Caco-2 cells, to ascertain the differences in epithelial gene expression between M cells and enterocytes. It became immediately apparent that some of these gene products are going to be unique apical membrane proteins (e.g. receptors, transporters, adhesion proteins) in M cells. By examining the differences between M cells and enterocytes in vitro and in vivo, one could identify key targets that can be used to generate M cell specific ligands. These ligands can then be used for targeting oral vaccines in particles.

[0040] The identification of over-expressed ribosomal proteins or homologues/related proteins thereof indicates a generally higher protein turnover or protein synthesis capacity in PPs or a possible role for such ribosomal proteins (or homologues thereof) in other cellular functions such as protein chaperoning, endocytosis, trafficking of proteins/antigens/particulates/viruses uptaken from the lumen of the gastrointestinal tract (GIT) and/or from the M cells to underlying immune cells, antigen presenting cells, dendritic cells, B cells, other cell types.

[0041] The identification of a series of transcription factors (TFs) that are over-expressed in PP tissue versus the control enterocyte GIT tissue is considered herein to indicate a role for such TFs in the development of M cell phenotype, in conferring M cell phenotype and/or in programming M cells to prime other downstream cellular events leading to a better or more efficacious immune outcome following antigen presentation. The co-delivery of genes coding for such TFs with either antigens themselves and/or with gene(s) coding for antigen(s) of question to M cells and/or PP tissue following oral administration provides the basis for a more efficacious and pronounced immune outcome when the TF coding genes are key or vital for driving M cells/PP tissue to an effective immune outcome.

[0042] The general over-expression of a number of proteins species in PPs versus NPPs, both membrane and cytosolic-associated was also determined by a novel technique of enrichment and M cell selection following enrichment of the follicle-associated epithelium (FAE) of Peyer's patch (PP FAE) by ethylene-diamine tetra-acetic acid (EDTA) extraction and recovery of M cells/PP FAE. Such novel or differentially expressed proteins have significant implications for the use of this protein expression information and methods of selection/enrichment of M cells/PP tissue for the targeting of drug/vaccine uptake to Peyer's patches. Among proteins found to be over expressed in rat PP tissue following this enrichment technique was the human serum albumin homolog which is considered here to have implications for drug/cargo transport from the GIT either into oracross intestinal tissue including PP tissue and systemic delivery of same to the blood.

### Incorporation by Reference

[0043] All references cited herein are incorporated herein by reference in their entireties.

[0044] All GenBank records specified bytheiraccession numbers are incorporated herein by their entireties.

[0045] The GenBank amino acid sequences and nucleotide sequences specified by their GenBank ID number are incorporated by reference herein. All GenBank records corresponding to those ID numbers are incorporated herein in their entirety. Absent a date specifying the date of the record, the date of the record is the filing date of this application.

[0046] Many of GenBank sequences specified by their GenBank ID numbers are reproduced herein in the section “Amino acid sequences and nucleotide sequences corresponding to selected GenBank ID numbers.” The CDS line refers to the exon(s).

[0047] Any GenBank ID numbers specified herein, absent a decimal point and an integer following that decimal point, is for GenBank version 1 of that sequence. Any GenBank ID number that has a decimal point and an integer following it is the GenBank version number.

[0048] The invention will be illustrated in more details with reference to the following Examples, but it should be understood that the present invention is not deemed to be limited thereto.

### EXAMPLES

### Example 1

### Preparation of Cytosolic (S100) and Membrane (P100) Proteins from Rat PP and NPP Tissues

[0049] Protein samples were prepared from PP and NPP tissue extracted from freshly sacrificed rats. These protein samples underwent electrophoresis on denatured SDS-PAGE gels and were stained using two different standard proteins Commassie Blue stains. Subsequently, fresh PP and NPP tissue samples were fractionated into cytosolic (S100) and membrane (P100) proteins and these samples were also electrophoresed on SDS-PAGE in order to compare S100 and P100 fractions in both PP and NPP tissues.

### Example 2

### Preparation of GIT Tissue or Co-Culture Cell Membrane (P100) and Cytosolic (S 100) Fractions

[0050] The fractions were prepared using the following procedure:

[0051] 1. Scrape the co-culture cells into PBS and pool cells into a universal.

[0052] 2. Centrifuge the cells for 5 minutes at 1,500 rpm.

[0053] 3. Remove the supernatant.

[0054] 4. Re-suspend the cell pellet in 3 volumes of ice-cold HED buffer, and allow it to swell for 5 minutes on ice.

[0055] 5. Homogenize the cells for 30 seconds.

[0056] 6. Centrifuge the homogenate in hard walled tubes at 40,000 rpm for 45 minutes at 4° C. in a Beckmann Ultra Centrifuge (rotor Ti90).

[0057] 7. Remove the supernatant (S 100) and re-suspend the pellet (P100) in 3 volumes of HEDG buffer, before centrifugation again at 1000 rpm for 2 min. Remove the supernatant and store on ice. Repeat the procedure and add the second supernatant to the first.

[0058] 8. Determine the protein concentration (using the Bio-Rad protein assay).

[0059] 9. All fractions were stored at −80° C.

[0060] The following reagents were used in the above methods: HED buffer (20 mM HEPES pH 7.67), 1 mM EGTA, 0.5 mM dithiothreitol, 1 mM phenylmethylsulphonyl fluoride (PMSF):

| | | |
|---|---|---|
| HEPES (pH to 7.67) | 0.5206 | g |
| EGTA | 38.04 | mg |
| Dithiothreitol | 7.71 | mg |
| Distilled water | to 100 | ml |

[0061] 10 μl PMSF stock solution was added to 1 ml of buffer prior to use.

[0062] HEDG buffer (the same as HED buffer plus 100 mM NaCl, 10% glycerol)

| | | |
|---|---|---|
| NaCl | 0.584 | g |
| Glycerol | 11.4 | ml |
| HEPES (pH to 7.67) | 0.5206 | g |
| EGTA | 38.04 | mg |
| Dithiothreitol | 7.71 | mg |
| Distilled water | to 100 | ml |

[0063] 10μl PMSF stock solution was added to 1 ml of buffer prior to use.

[0064] PMSF(100 mM) stock solution

| | |
|---|---|
| PMSF | 17.42 mg |
| Isopropanol | |

### Example 3

### Isolation of Epithelial Sheaths from Rat Pever's Patch and Non-Pever's Patch Tissue

[0065] The M cell is a very elusive cell type, at least in terms of isolating a purified population. Previous attempts have found that when M cells are separated and purified and put into culture they very quickly lose their characteristic morhphology and probably gene/protein expression profile. In many cases this is due to the length of time taken to isolate and purify the cells from the very homogenous mix of cells in a Peyer's patch. We desired a quick and routine method to enrich for M cells is Peyer's patch samples. M cells are only contained in the epithelium of Peyer's patches, the so-called follicle associated epithelium (FAE), while underneath the epithelial layer lays all the B and T lymphocytes, dendritic cells etc. So by isolating the epithelium away from the rest of the Peyer's patch dome, we are greatly enriching it for the M cell population. Previously, treatment of mouse intestinal tissue with EDTA was shown to cause separation of the epithelium as a sheet from the rest of the tissue, allowing for it's specific isolation (Bjerknes M and Cheng H (1981). Methods for the isolation of intact epithelium from the mouse intestine. Anat. Rec., (199):565). This method was adapted for the isolation of FAE from rat Peyer's patch. Control epithelium from normal gut tissue (no Peyer's patches) was used as a control.

[0066] Epithelial sheaths were prepared using EDTA method comprising the following steps:

[0067] 1. Sacrifice the rats (Wistar) by cervical dislocation.

[0068] 2. Remove the entire length of the GIT tract from (but not including) the stomach to the caecum and place in a dish of PBS (at room temperature).

[0069] 3. Excise the Peyer's patches, taking care to remove as much normal non-PP GI tissue as is visible. Rinse briefly in PBS.

[0070] 4. Also take samples of normal non-Peyer's (N PP) tissue close to the patches, rinse in PBS and treat as for the PPs (steps 5-9,11-12).

[0071] 5. Pool the PP's from the entire GI section in Hank's Buffered Saline Solution (HBSS, Gibco Life Sciences) with 0.011 M glucose and 25 mM Hepes.

[0072] 6. When pooling is complete, place PP sections into 15-20 ml of HBSS (with 0.011M glucose and 25 mM Hepes) along with 40 mM of EDTA into a small conical flask.

[0073] 7. Add a stirrer bar to the flask, place on a stirring plate and spin the PP's for 15 min at RT.

[0074] 8. After 15 minutes pipette the PP solution vigorously with a wide-bore 3 ml plastic pasteur pipette.

[0075] 9. Strain the supernatant through a 100 micron nylon cell strainer (from FALCON™, 352360).

[0076] 10. Move the filter to another 50 ml tube and wash out the residue material on the filter with HBSS (with 0.011M glucose and 25 mM Hepes, no EDTA). This residue contains the majority of the PP dome epithelial sheaths.

[0077] 11. Centrifuge the PP residue material at 3000 rpm for 5 min. Also centrifuge the NPP tissue supernatant at 3000 rpm for 5 min.

[0078] 12. Snap freeze the cell pellets and store at −70° C.

### Example 4

### Identification of Over-Expressed Proteins in Enriched M cells/PP FAE Cells

[0079] Epithelial cell layers of Wistar rat PP (representing enriched M cells/PP FAE cells) and normal villi were extracted using EDTA as described in Example 3 above. Epithelial layers from numerous Patches and rats were pooled and the protein isolated into either cytosolic and membrane fractions following centrifugal separation. 2D gel electrophoresis (between isoelectric points pH 3.5 to 10) was performed on 50 μg of each fraction, wherein the gels were silver stained. The gels were overlaid, and numerous differentially expressed proteins between the membrane fractions of PP and normal villi epithelia were observed. Further, protein samples underwent a second 2D gel electrophoresis, this time the gel was stained with a “special” silver stain, that did not inhibit the mass spectrometry analysis of individual spots. The differentially expressed proteins were identified and highlighted by gel overlay.

[0080] Thirty-seven protein spots were identified that were increased in PP over villi epithelial membrane fractions. Of these, 16 spots (the most highly over-expressed) were chosen for mass spectrometry analysis. The spots were digested with endoproteinase Lys-C/trypsin (8:1 ratio) and analyzed on a MALDI-MS. The spots, however, gave very poor spectra and only 4 of the 16 were identifiable. These were:

[0081] serum albumin;

[0082] calreticulin;

[0083] 14-3-3 zeta (tentative ID; mouse); and

[0084] nucleoside diphosphate kinase B.

[0085] One protein showed homologyto human serum albumin (HSA). Work byA. Fasano at Maryland had suggested that Zonulin, the human homologue of ZOT, showed sequence homology to human serum albumin (85% homology across the limited sequence available from the Fasano's work). Given our finding that a protein differentially expressed in rat PP tissue shows homology to HSA, we propose that HSA (or a homologue or splice variant thereof) is involved in drug transport in the GIT, in particular Peyer's patch tissue of the GIT.

[0086] Calreticulin is a 46-kDa Ca (2+)-binding chaperone of the endoplasmic reticulum membranes. This protein binds Ca (2+) with high capacity, affects intracellular Ca (2+) homeostasis, and functions as a lectin-like chaperone. Given the over-abundance of expression of this protein in epithelial layers selected from PP tissue and the role of this protein as a lectin-like chaperone, we propose that this protein is a valuable protein target to aid or facilitate the intracellular trafficking of antigens or antigens in particles following targeted delivery to M cells or PP tissue. Proteins comprising chimerics of calreticulin plus a polypeptide with an antigen of choice would therefore prove valuable in that regard.

[0087] Members of the 14-3-3 protein family have been identified as regulatory elements in intracellular signaling pathways and cell cycle control. There had been reports that 14-3-3 protein can be used as a marker for Creutzfeldt-Jacob Disease (CJD) in cerebrospinal fluid (CSF). It is proposed that this protein or the gene coding for it is valuable in the control of the M cell phenotype, and as a result it would be advantageous to co-deliver that protein or gene with a protein, antigen, or DNA vaccine.

[0088] Nucleoside diphosphate kinases (NDP kinases) form a family of oligomeric enzymes present in all organisms. Eukaryotic NDP kinases are hexamers composed of identical subunits (approximately 17 kDa). A distinctive property of human NDPK-B is its ability to stimulate gene transcription. This property is independent of its catalytic activity and is possibly related to the role of this protein in cellular events including differentiation and tumor metastasis. Given our discovery of the increased expression of nucleoside diphosphate kinase B in M cell enriched PP FAE cells, we propose the importance of this protein in determining or controlling M cell phenotype, in M cell development, and optimal activation or priming of the mucosal immune system.

### Example 5

### Gene Expression Analysis of Rat PP and NPP Tissue Samples

[0089] In addition to the proteomic studies highlighted above, PP and NPP tissue samples were sent for gene expression analysis to CLONTECH Laboratories Inc. (a division of Becton Dickinson (BD) Biosciences) who then extracted RNA from the tissues to probe on ATLAS™1.2 rat arrays. The data containing differential expression levels of 1,200 genes many of which are presented in Table 1 below. The data show over-expression of many proteins. In Table 1, over-expressed genes are shown in bold and italicized.

[0090] In Table 1, “N/C” means not calculated due to manually-determined inconsistencies in one or both spots, and “?” means low confidence level (small difference).

[0091] Also, over-expressed genes from Table 1 that had a fold change above 0, as well as over-expressed genes are shown in Table 2 below with corresponding GenBank accession numbers for rat and human origin.

[0092] Based on the results (ratio PP/Normal epithelial tissue) in Table 1, the following proteins are of the particular interest: clusterin, T-cell surface glycoprotein CD5 precursor, HSP84, Ca2+-dependant phospholipase A2 precursor, ribosomal proteins S12, S11, L12, L11, S29, S19, L21, L19, L13, L44, and L36A.

[0093] In addition a series of genes coding for different TFs was noted including the following:

[0094] Jun-B; c-jun related TF,

[0095] Jun-D; c-jun related TF,

[0096] STAT 3-signal transducer and activator of transcription 3,

[0097] NF-kappaβ Tf p105 subunit,

[0098] CREB active TF,

[0099] New england deaconess TF,

[0100] C-jun proto-oncogene; TF AP-1; RJG-9,

[0101] S-myc proto-oncogene; myc related,

[0102] Nm23-M2; nucleoside diphosphate kinase B; metastasis reducing protein,

[0103] NDK-B; nucleoside diphosphate kinase B; metastasis reducing protein,

[0104] Lim-2; embryonic motor neuron topographic organizer; homeobox protein LIM-2, and

[0105] C-est-I proto-oncogene; p54.

[0106] TF coding genes such as these are considered here to be important in the development of M cell phenotype and in priming the immune system. Their co-delivery or co-targeting with DNA vaccine genes and/or with vaccines is expected to enhance activation of mucosal immunity to the co-delivered DNA vaccine and/or antigen by virtue of their priming of the cells to give a better mucosal immunity outcome.

TABLE 1
GENE EXPRESSION DATA FROM ATLAS 1.2 RAT ARRAY ANALYSIS

| | | Spot Intensity | | | | |
|---|---|---|---|---|---|---|
| # | coordinate | PP1 | NE1 | RATIO | Difference | GENE |
| 1 | A03c | 38 | 6 | 0.16 | −32 | T-cell surface glycoprotein CD5 precursor; lymphocyte glycoprotein LY1 |
| 2 | A03g | 31 | 57 | 1.84 | 26 | CD4 homologue, W3/25 antigen |
| 3 | A04f | 20 | 72 | 3.60 | 52 | signal transducer CD24 precursor; heat stable antigen (HSA); nectadrin |
| 4 | A04i | 17 | 40 | 2.35 | 23 | CD2, membrane glycoprotein, T-cell marker |
| 5 | A04i | 8 | 34 | 4.25 | 26 | scavenger receptor class B type I |
| 6 | A04m | 16 | 31 | 1.94 | 15 | SR13 myelin protein, peripheral myelin protein 22 (PMP-22), CD25 protein |
| 7 | A05a | 4 | 17 | 4.25 | 13 | glutamyl aminopeptidase A |
| 8 | A05i | 52 | 29 | 0.56 | −23 | I-kB (I-kappa B) alpha chain; RL/IF-1 gene product |
| 9 | A05m | 6 | 18 | 3.00 | 12 | interferon regulatory factor 1 (IRF1) |
| 10 | A06a | 7 | 21 | 3.00 | 14 | LIM domain protein CLP36, homologous to rat RIL |
| 11 | A06c | 152 | 78 | 0.51 | −74 | Gax. growth-arrest-specific protein |
| 12 | A07c | 42 | 24 | 0.57 | −18 | G1/S-specific cyclin D3 (CCND3) |
| 13 | A07l | 17 | 3 | 0.18 | −14 | M-phase inducer phosphatase 2 (MPI2); cell division control protein 25 B (CDC25B) |
| 14 | A07n | 37 | 20 | 0.54 | −17 | p55cdc; cell division control protein 20 |
| 15 | A08e | 56 | 24 | 0.43 | −32 | prothymosin-alpha (PTMA) |
| 16 | A08n | 32 | 105 | 3.28 | 73 | antigen peptide transporter 1 |
| 17 | A09g | 13 | 36 | 2.77 | 23 | proteasome delta subunit precursor; macropain delta; multicatalytic endopeptidase |
| | | | | | | complex delta; |
| 18 | A09i | 15 | 27 | 1.80 | 12 | proteasome component C13 precursor; macropain subunit C13; multicatalytic |
| | | | | | | endopeptidase |
| 19 | A09j | 341 | 893 | 2.62 | 552 | apolipoprotein A-I precursor (APO-AI) |
| 20 | A09k | 72 | 723 | 10.04 | 651 | apolipoprotein A-IV precursor (APO-AIV) |
| 21 | A11l | 1 | 13 | 13.00 | 12 | ErbB3 EGF receptor-related proto-oncogene; HER3 |
| 22 | A12c | 21 | 48 | 2.29 | 27 | A-raf proto-oncogene |
| 23 | A12i | 19 | 45 | 2.37 | 26 | rac-alpha serine/threonine kinase (RAC-PK-alpha); protein kinase B (PKB), AKT1 |
| 24 | A13k | 208 | 60 | 0.29 | −148 | HSP84; HSP90-beta; heat shock 90 kD protein |
| 25 | A14c | 7 | 38 | 5.43 | 31 | glutathione S-transferase Ya subunit (GST YA); liqandin subunit 1 alpha |
| 26 | A14d | 65 | 162 | 2.49 | 97 | microsomal glutathione S-transferase (GST12; MGST1) |
| 27 | A14e | 94 | 160 | 1.70 | 66 | glutathione S-transferase Yb subunit; GST subunit 4 mu (GSTM2) |
| 28 | A14q | 129 | 265 | 2.05 | 136 | glutathione S-transferase P subunit; GST subunit 7 pi (GST7-7) |
| 29 | A14n | 7 | 19 | 2.71 | 12 | NADPH-cytochrome P450 reductase (CPR); POR |
| 30 | B01h | 121 | 207 | 1.71 | 86 | copper-zinc-containing superoxide dismutase 1 (Cu—Zn SOD1) |
| 31 | B02f | 4 | 25 | 6.25 | 21 | fructose (glucose) transporter |
| 32 | B05k | 13 | 36 | 2.77 | 23 | sodium channel SCNB2, beta 2 subunit, brain |
| 33 | B06d | 28 | 12 | 0.43 | −16 | potassium channel, inward rectifier 11 |
| 34 | B07k | 2 | 18 | 9.00 | 16 | proton-coupled dipeptide cotransporter |
| 35 | B08b | 59 | 181 | 3.07 | 122 | fibroblast ADP/ATP carrier protein; ADP/ATP translocase 2, adenine nucleotide |
| | | | | | | translocator 2 |
| 36 | B09i | 7 | 43 | 6.14 | 36 | sodium-glucose cotransporter 1 |
| 37 | B09l | 40 | 115 | 2.88 | 75 | Na+/K+ ATPase alpha 1 subunit |
| 38 | B09n | 43 | 78 | 1.81 | 35 | vacuolar ATP synthase 16-kDa proteolipid subunit, ATP6C; MVP; ATPL |
| 39 | B10b | 10 | 78 | 7.80 | 68 | sodium/potassium-transporting ATPase beta 1 subunit (ATP1B1) |
| 40 | B12e | 10 | 68 | 6.80 | 58 | urate transporter/channel |
| 41 | B12f | 143 | 297 | 2.08 | 154 | ATP synthase lipid-binding protein P1 precursor, ATPase protein 9, ATP5G1 |
| 42 | B12q | 21 | 112 | 5.33 | 91 | ATP synthase, subunit c, P2 gene |
| 43 | B12m | 18 | 38 | 2.11 | 20 | annexin IV(ANX4); lipocortin IV;36-kDa zymogen granule membrane-associated |
| | | | | | | protein (ZAP36) |
| 44 | B13f | 37 | 127 | 3.43 | 90 | lipocortin 2 |
| 45 | B14d | 59 | 326 | 5.53 | 267 | fatty acid-binding protein (liver; L-FABP); Z-protein; squalene - & sterol-carrier |
| | | | | | | protein (SCP); P14 |
| 46 | B14f | 49 | 157 | 3.20 | 108 | fatty acid-binding protein (intestinal; I-FABP; FABPI) |
| 47 | C02f | 19 | 78 | 4.11 | 59 | fructose-bisphosphate aldolase B (ALDOB); liver-type aldolase |
| 48 | C02g | 37 | 76 | 2.05 | 39 | fructose-bisphosphate aldolase A (ALDOA); muscle-type aldolase |
| 49 | C02j | 15 | 30 | 2.00 | 15 | testis fructose-6-phosphate 2-kinase/fructose 2,6-biphosphate |
| | | | | | | (testis 6PF-2-K/fru-2,6-P2ase); 6- |
| 50 | C02n | 604 | 1123 | 1.86 | 519 | cytochrome c oxidase subunit Vb & Vla precursor (COX5B) |
| 51 | C03a | 9 | 20 | 2.22 | 11 | cytochrome B5 (CYB5) |
| 52 | C03e | 65 | 138 | 2.12 | 73 | mitochondrial hydroxymethylglutaryl-CoA synthase precursor (HMG-CoA synthase); |
| | | | | | | 3-hydroxy-3- |
| 53 | C03f | 177 | 760 | 4.29 | 583 | cytochrome oxidase, subunit I, Sertoli cells |
| 54 | C03q | 27 | 47 | 1.74 | 20 | ATPase, subunit F, vacuolar (vatf) |
| 55 | C03i | 641 | 1087 | 1.70 | 446 | cvtochrome c oxidase, subunit IV, mitochondrial |
| 56 | C03l | 46 | 147 | 3.20 | 101 | cytochrome c oxidase, subunit Va, mitochondrial |
| 57 | C03l | 317 | 180 | 0.57 | −137 | cytochrome c oxidase, subunit VIIIh |
| 58 | C04b | 189 | 351 | 1.86 | 162 | mitochondrial ATP synthase beta subunit precursor (ATP5B) |
| 59 | C04q | 23 | 127 | 5.52 | 104 | creatine kinase, ubiquitous, mitochondrial |
| 60 | C06c | 6 | 52 | 8.67 | 46 | fatty acid amide hydrolase |
| 61 | C06j | 73 | 175 | 2.40 | 102 | cytochrome P450 17 (CYP17), P450C17, CYPXVII, steroid 17-alpha-hydroxylase/17,20 |
| | | | | | | lyase |
| 62 | C07i | 9 | 51 | 5.67 | 42 | cytochrome P-450 4F1, hepatic tumour |
| 63 | C07l | 19 | 39 | 2.05 | 20 | cytochrome P-450 4F4 |
| 64 | C08a | 17 | 33 | 1.94 | 16 | cytochrome P-450 4F5 |
| 65 | C08l | 8 | 24 | 3.00 | 16 | adenylate kinase 3 |
| 66 | C08m | 32 | 65 | 2.03 | 33 | cAMP-dependent protein kinase type I-alpha regulatory chain |
| 67 | C09e | 7 | 30 | 4.29 | 23 | glutathione synthetase (GSH synthetase; GSH-S; GSS). glutathione synthase |
| 68 | C10e | 25 | 10 | 0.40 | −15 | carbonic anhydrase 4 |
| 69 | C10j | 19 | 9 | 0.47 | −10 | alkaline phosphatase |
| 70 | C10k | 21 | 5 | 0.24 | −16 | dopamine beta-hydroxylase |
| 71 | C10l | 29 | 11 | 0.38 | −18 | acetylcholinesterase, T subunit, glycolipid-anchored |
| 72 | C10m | 228 | 445 | 1.95 | 217 | NADP+ alcohol dehydrogenase; aldehyde reductase (ALR); 3-dG-reducing enzyme |
| 73 | C11b | 19 | 33 | 1.74 | 14 | calcium bindinq protein 2 (CABP2), endoplasmic reticulum stress protein (ERP72); |
| | | | | | | protein disulfide |
| 74 | C11d | 97 | 55 | 0.57 | −42 | 60S ribosomal protein L44; L36A |
| 75 | C11e | 1728 | 527 | 0.30 | −1201 | 40S ribosomal protein S12 |
| 76 | C11q | 400 | 179 | 0.45 | −221 | ribosomal protein L11 |
| 77 | C11h | 670 | 355 | 0.53 | −315 | ribosomal protein L13 |
| 78 | C11i | 967 | 424 | 0.44 | −543 | ribosomal protein L12 |
| 79 | C11k | 812 | 413 | 0.51 | −399 | S19; 40S ribosomal protein S19 |
| 80 | C11l | 554 | 286 | 0.52 | −268 | 60S ribosomal protein L21 |
| 81 | C11m | 1405 | 737 | 0.52 | −668 | 60S ribosomal protein L19 (RPL19) |
| 82 | C11n | 315 | 109 | 0.35 | −206 | 40S ribosomal protein S11 |
| 83 | C12b | 158 | 48 | 0.30 | −110 | Fte-1; putative v-fos transformation effector protein; yeast mitochondrial protein |
| | | | | | | import homolog; 40S |
| 84 | C12d | 1451 | 787 | 0.54 | −664 | elongation factor 2 (EF2) |
| 85 | C12l | 346 | 10 | 0.03 | −336 | clusterin (CLU); testosterone-repressed prostate message 2 (TRPM2); apolipoprotein |
| | | | | | | J; sulfated |
| 86 | C12m | 14 | 0 | Undefined | −14 | activator of apoptosis harakiri (HRK); neuronal death protein 5 (DP5); BID3 |
| 87 | C13c | 19 | 5 | 0.26 | −14 | SURVIVAL OF MOTOR NEURON(RSMN) |
| 88 | D08i | 6 | 17 | 2.83 | 11 | retinoid X receptor alpha (RXR alpha; RXRA); NR2B1 |
| 89 | D12c | 6 | 18 | 3.00 | 12 | INOSITOL TRIPHOSPHATE RECEPTOR SUBTYPE 3 |
| 90 | E01m | 10 | 50 | 5.00 | 40 | neurotrophin 3 precursor (NTF3); neurotrophic factor, HDNF, nerve growth |
| | | | | | | factor 2 (NGF2) |
| 91 | E02c | 19 | 8 | 0.42 | −11 | transforming growth factor, beta 1 |
| 92 | E03k | 40 | 185 | 4.63 | 145 | C-type natriuretic peptide precursor (CNP; NPPC) |
| 93 | E04b | 17 | 7 | 0.41 | −10 | thyroid stimulating hormone, beta |
| 94 | E07c | 33 | 15 | 0.45 | −18 | c-src-kinase (CSK) & negative regulator; tyrosine-protein kinase |
| 95 | E08a | 105 | 249 | 2.37 | 144 | extracellular signal-regulated kinase 1 (ERK1); mitogen-activated protein kinase 1 |
| | | | | | | (MAP kinase 1: |
| 96 | E08l | 8 | 22 | 2.75 | 14 | protein kinase C delta type (PKC-delta) |
| 97 | E09l | 36 | 68 | 1.89 | 32 | insulin receptor-related receptor-alpha (sIRR-1) |
| 98 | E10f | 3 | 17 | 5.67 | 14 | CamK II; calcium/calmodulin-dependent protein kinase brain type II beta |
| 99 | E10q | 3 | 13 | 4.33 | 10 | CamK I, calcium/calmodulin-dependent protein kinase type I + CaM-like protein kinase |
| 100 | E10l | 18 | 42 | 2.33 | 24 | Casein kinase I delta, CKId; 49-kDa isoform |
| 101 | E11e | 15 | 29 | 1.93 | 14 | cyclin-dependent kinase 4 (CDK4); cell division protein kinase 4, PSK-J3 |
| 102 | E12g | 23 | 45 | 1.96 | 22 | protein phosphatase 2C isoform; Mg2+ dependent protein phosphatase beta isoform |
| 103 | E13i | 40 | 19 | 0.48 | −21 | quanine nucleotide-bindinq protein G(I) alpha 2 subunit (GNAI2); adenylate cyclase- |
| 104 | E14i | 268 | 661 | 2.47 | 393 | rab12, ras related GTPase |
| 105 | F01e | 10 | 29 | 2.90 | 19 | RalGDSB; GTP/GDP dissociation stimulator for a ras-related GTPase |
| 106 | F02a | 189 | 97 | 0.51 | −92 | calcium-dependent phospholipase A2 precursor (PLA2); phosphatidylcholine 2- |
| 107 | F02h | 15 | 79 | 5.27 | 64 | phospholipase C beta 3 (PLC-beta 3) |
| 108 | F04e | 33 | 57 | 1.73 | 24 | 14-3-3 protein zeta/delta, PKC inhibitor protein-1, KCIP-1, mitochondrial import |
| | | | | | | stimulation factor |
| 109 | F04k | 15 | 29 | 1.93 | 14 | 14-3-3 protein epsilon; PKC inhibitor protein-1, KCIP-1; mitochondrial import |
| | | | | | | stimulation factor L |
| 110 | F05e | 8 | 21 | 2.63 | 13 | presenilin 1 (PSNL1; PSEN1; PS1); S182 protein |
| 111 | F05j | 6 | 17 | 2.83 | 11 | PDGF-associated protein |
| 112 | F06a | 59 | 143 | 2.42 | 84 | ADP-ribosylation factor 5 (ARF5) |
| 113 | F06j | 12 | 22 | 1.83 | 10 | dipeptidase (DPEP1) |
| 114 | F07m | 7 | 29 | 4.14 | 22 | granzyme M precursor (GZMM). MET-ASE; natural killer cell granular protease; |
| | | | | | | RNK-MET-1 |
| 115 | F08e | 11 | 100 | 9.09 | 89 | angiotensin converting enzyme (ACE; somatic; dipeptidyl carboxypeptidase I, kininase II |
| 116 | F08h | 18 | 48 | 2.67 | 30 | amonipeptidase B |
| 117 | F08i | 39 | 92 | 2.36 | 53 | kidney aminopeptidase M (APM) |
| 118 | F08k | 19 | 81 | 4.26 | 62 | metalloendopeptidase meprin beta subunit |
| 119 | F08l | 5 | 15 | 3.00 | 10 | endothelin converting enzyme |
| 120 | F09a | 3 | 16 | 5.33 | 13 | gelatinase A |
| 121 | F09g | 13 | 27 | 2.08 | 14 | cathepsin L |
| 122 | F09l | 14 | 28 | 2.00 | 14 | proteasome component C3 |
| 123 | F12a | 6 | 16 | 2.67 | 10 | leukocyte common antigen-related tyrosine phosphatase (LAR) |
| 124 | G31 | 12 | 39 | 3.25 | 27 | ornithine decarboxylase (ODC) |
| 125 | G43 | 287 | 1132 | 3.94 | 845 | cytoplasmic beta-actin (ACTB) |
| 126 | G47 | 7327 | 3614 | 0.49 | −3713 | 40S ribosomal protein S29 (RPS29) |

[0107] TABLE 2
RAT GENES (PP VS. NPP)

| | Fold | GenBank ID | GenBank ID |
|---|---|---|---|
| GENE | change | Human | Rat |
| activator of apoptosis harakiri (HRK); neuronal death | ** | U76376.1 | D83697 |
| protein 5 (DP5); BID3 | | | |
| RET ligand 1 (RET1) | ** | — | U97142 |
| P2X purinoceptor 1; ATP receptor P2X1; purinergic | ** | P51575 | U14414 |
| receptor; RP-2 protein | | | |
| leukocyte common antigen precursor (LCA); CD45 | ** | Y00638 | M10072 |
| antigen; T200; PTPRC | | | |
| amphiphysin II (AMPH2) | ** | AF001383.1 | Y13380 |
| Jak3 tyrosine-protein kinase; Janus kinase 3 | ** | XM_038595.3 | D28508 |
| DCC; netrin receptor; immunoglobulin gene superfamily | ** | M32292.1 | AH002168.1 |
| member; former tumor suppressor protein candidate | | | |
| c-fgr proto-oncogene | ** | AAA52762.1 | X57018.1 |
| small inducible cytokine A3 precursor (SCYA3); | ** | P10147 | AF119381.1 |
| macrophage inflammatory protein 1 alpha precursor | | | |
| (MIP1-alpha; MIP1A) | | | |
| protein kinase C beta-If type (PKC-beta I) + protein kinase | ** | X06318 | P04410 |
| C beta-II type (PKC-beta II) | | | |
| E-selectin precursor; endothelial leukocyte adhesion | ** | P16581 | L25527 |
| molecule 1 (ELAM-1); leukocyte-endothelial cell adhesion | | | |
| molecule 2 (LECAM2); CD62E | | | |
| T-cell receptor CD3 zeta subunit | ** | J04132.1 | L08447.1 |
| Protein kinase C-binding protein beta15; RING-domain | ** | — | U48248 |
| containing | | | |
| G1/S-specific cyclin C (CCNC) | ** | AAC50825.1 | D14013 |
| maspin; protease inhibitor 5 (PI5); tumor suppressor | ** | U04313.1 | U58857 |
| peptide/histidine transporter | ** | — | AB000280 |
| acetyl-CoA carboxylase (ACC); biotin carboxylase | ** | X68968.1 | AH002123.1 |
| fibroblast growth factor receptor subtype 4 | ** | L03840.1 | M91599 |
| LCR-1; putative chemokine and HIV coreceptor homolog; | ** | — | U54791 |
| G protein-coupled receptor | | | |
| tumor necrosis factor alpha precursor (TNF-alpha; TNFA); | ** | AF043342.1 | X66539 |
| cachectin | | | |
| CC chemokine MIP3 alpha exodus | ** | — | U90447.1 |
| luteinizing hormone, alpha | ** | NM_000735.2 | V01252 |
| Ctk; non-receptor protein tyrosine kinase (batk) | ** | P42679 | L34542.1 |
| RhoGAP; p122 | ** | — | S54293 |
| Adenylyl cyclase type V | ** | M83533.1 | M96159 |
| cathepsin S precursor (CTSS) | ** | P25774 | L03201.1 |
| O-6-methylguanine-DNA methyltransferase (MGMT); | ** | M31767.1 | NM_012861.1 |
| methylated-DNA-protein-cysteine methyltransferase | | | |
| clusterin (CLU); testosterone-repressed prostate message | 34.60 | X14723 | U02391.1 |
| 2 (TRPM2); apolipoprotein J; sulfated glycoprotein 2 | | | |
| (SGP2); dimeric acid glycoprotein (DAG) | | | |
| T-cell surface glycoprotein CD5 precursor; lymphocyte | 6.33 | X04391.1 | D10728 |
| glycoprotein LY-1 (LYT1) | | | |
| M-phase inducer phosphatase 2 (MPI2); cell division | 5.67 | S78187.1 | D16237 |
| control protein 25 B (CDC25B) | | | |
| dopamine beta-hydroxylase | 4.20 | Y00096.1 | L12407 |
| SURVIVAL OF MOTOR NEURON(RSMN) | 3.80 | AAC50473.1 | U75369 |
| HSP84; HSP90-beta; heat shock 90kD protein | 3.47 | XM_055551.3 | S45392 |
| Fte-1; putative v-fos transformation effector protein; yeast | 3.29 | M84711.1 | M84716.1 |
| mitochondrial protein import homolog; 40S ribosomal | | | |
| protein S3A; RPS3A | | | |
| 40S ribosomal protein S12 | 3.28 | X53505 | M18547 |
| 40S ribosomal protein S11 | 2.89 | X06617 | K03250 |
| acetylcholinesterase, T subunit, glycolipid-anchored | 2.64 | M55040.1 | X71089.1 |
| carbonic anhydrase 4 | 2.50 | NM_000717.2 | I52551 |
| thyroid stimulating hormone, beta | 2.43 | S70587.1 | M13897.1 |
| transforming growth factor, beta 1 | 2.38 | M34057 | NM_021578.1 |
| prothymosin-alpha (PTMA) | 2.33 | AF257099.1 | M20035 |
| potassium channel, inward rectifier 11 | 2.33 | — | D42145 |
| ribosomal protein L12 | 2.28 | L06505.1 | X53504.1 |
| ribosomal protein L11 | 2.23 | X79234.1 | X62146.1 |
| c-src-kinase (CSK) & negative regulator; tyrosine-protein | 2.20 | X59932.1 | X58631 |
| kinase | | | |
| alkaline phosphatase | 2.11 | AAA98616.1 | S18408 |
| guanine nucleotide-binding protein G(I) alpha 2 subunit | 2.11 | XM_041507.1 | NM_031035.1 |
| (GNAI2); adenylate cyclase-inhibiting G alpha protein | | | |
| 40S ribosomal protein S29 (RPS29) | 2.03 | NM_001032.2 | X59051 |
| S19; 40S ribosomal protein S19 | 1.97 | P39019 | P17074 |
| Gax, growth-arrest-specific protein | 1.95 | — | Z17223.1 |
| calcium-dependent phospholipase A2 precursor (PLA2); | 1.95 | M22430.1 | U38376.1 |
| phosphatidylcholine 2-acylhydrolase (PLA2-10; PLA2G5) | | | |
| 60S ribosomal protein L21 | 1.94 | P46778 | M27905 |
| 60S ribosomal protein L19 (RPL19) | 1.91 | X63527 | J02650 |
| ribosomal protein L13 | 1.89 | P26373 | X78327.1 |
| p55cdc; cell division control protein 20 | 1.85 | AF099644.1 | AF052695.1 |
| elongation factor 2 (EF2) | 1.84 | X51466 | Y07504.1 |
| I-κB (I-kappa B) alpha chain; RL/IF-1 gene product | 1.79 | X63594.1 | AF388201.1 |
| 60S ribosomal protein L44; L36A | 1.76 | M15661 | P10661 |
| cytochrome c oxidase, subunit VIIIh | 1.76 | J04823.1 | NM_012786.1 |
| G1/S-specific cyclin D3 (CCND3) | 1.75 | NM_001760.2 | NM_012766.1 |
| cytochrome c oxidase, subunit IV, mitochondrial | 0.59 | AF017115.1 | X14209 |
| glutathione 3-transferase Yb subunit; GST subunit 4 mu | 0.59 | — | X04229.1 |
| (GSTM2) | | | |
| copper-zinc-containing superoxide dismutase 1 (Cu-Zn | 0.58 | — | NM_017050.1 |
| SOD1) | | | |
| 14-3-3 protein zeta/delta; PKC inhibitor protein-1; KCIP-1; | 0.58 | U28964.1 | L07913.1 |
| mitochondrial import stimulation factor S1 subunit | | | |
| calcium binding protein 2 (CABP2); endoplasmic reticulum | 0.58 | XM_012077.4 | M86870 |
| stress protein (ERP72); protein disulfide isomerase- | | | |
| related protein precursor | | | |
| ATPase, subunit F, vacuolar (vatf) | 0.57 | AF047436.1 | U43175.1 |
| proteasome component C13 precursor; macropain subunit | 0.56 | P28062 | NM_080767.1 |
| C13; multicatalytic endopeptidase complex subunit C13 | | | |
| PSMB8 | | | |
| vacuolar ATP synthase 16-kDa proteolipid subunit; | 0.55 | NM_001695.1 | M62762.1 |
| ATP6C; MVP; ATPL | | | |
| dipeptidase (DPEP1) | 0.55 | NM_004413.1 | M94056 |
| CD4 homologue, W3/25 antigen | 0.54 | BC025782. | M15768.1 |
| mitochondrial ATP synthase beta subunit precursor | 0.54 | NM_001686.1 | M19044.1 |
| (ATP5B) | | | |
| cytochrome c oxidase subunit Vb & VIa precursor | 0.54 | M59250.1 | X14208.1 |
| (COX5B) | | | |
| insulin receptor-related receptor-alpha (sIRR-1) | 0.53 | — | M90660.1 |
| cyclin-dependent kinase 4 (CDK4); cell division protein | 0.52 | P11802 | P35426 |
| kinase 4; PSK-J3 | | | |
| 14-3-3 protein epsilon; PKC inhibitor protein-1; KCIP-1; | 0.52 | XM_088041.1 | D30739.1 |
| mitochondrial import stimulation factor L subunit | | | |
| SR13 myelin protein; peripheral myelin protein 22 (PMP- | 0.52 | — | M69139.1 |
| 22); CD25 protein | | | |
| cytochrome P-450 4F5 | 0.52 | — | AF288818.1 |
| NADP+ alcohol dehydrogenase; aldehyde reductase | 0.51 | J04794.1 | D10854.1 |
| (ALR); 3-dG-reducing enzyme | | | |
| protein phosphatase 2C isoform; Mg2+ dependent protein | 0.51 | — | S90449.1 |
| phosphatase beta isoform | | | |
| testis fructose-6-phosphate 2-kinase/fructose 2,6- | 0.50 | NM_002625.1 | X15579.1 |
| biphosphate (testis 6PF-2-K/fru-2,6-P2ase); 6- | | | |
| phosphofructo-2-kinase; fructose-2,6-bisphosphatase | | | |
| proteasome component C3 | 0.50 | D00760 | J02897.1 |
| cAMP-dependent protein kinase type I-alpha regulatory | 0.49 | P10644 | P09456 |
| chain | | | |
| cytochrome P-450 4F4 | 0.49 | — | U39206.1 |
| fructose-bisphosphate aldolase A (ALDOA); muscle-type | 0.49 | XM_043948.2 | NM_012495.1 |
| aldolase | | | |
| glutathione S-transferase P subunit; GST subunit 7 pi | 0.49 | — | X02904.1 |
| (GST7-7) | | | |
| ATP synthase lipid-binding protein P1 precursor; ATPase | 0.48 | NM_005175.1 | NM_017311.1 |
| protein 9; ATP5G1 | | | |
| cathepsin L | 0.48 | M20496.1 | Y00697.1 |
| annexin IV(ANX4); lipocortin IV;36-kDa zymogen granule | 0.47 | XM_031596.3 | NM_024155.1 |
| membrane-associated protein (ZAP36) | | | |
| mitochondrial hydroxymethylglutaryl-CoA synthase | 0.47 | P54868 | P22791 |
| precursor (HMG-CoA synthase); 3-hydroxy-3- | | | |
| methylglutaryl-CoA synthase; HMGCS2 | | | |
| cytochrome B5 (CYB5) | 0.45 | M22865.1 | D13205.1 |
| A-raf proto-oncogene | 0.44 | P10398 | X06942 |
| Casein kinase I delta; CKId; 49-kDa isoform | 0.43 | P48730 | Q06486 |
| CD2, membrane glycoprotein, T-cell marker | 0.43 | M14362.1 | X05111.1 |
| kidney aminopeptidase M (APM) | 0.42 | XM_087746.1 | M26710 |
| rac-alpha serine/threonine kinase (RAC-PK-alpha); protein | 0.42 | P31749 | Y15748.1 |
| kinase B (PKB); AKT1 | | | |
| extracellular signal-regulated kinase 1 (ERK1); mitogen- | 0.42 | P27361 | P21708 |
| activated protein kinase 1 (MAP kinase 1; MAPK1); | | | |
| insulin - stimulated microtubule-associated protein-2 | | | |
| kinase; MNK1; PRKM3; ERT2; p44-MAPK | | | |
| cytochrome P450 17 (CYP17); P450C17; CYPXVII; | 0.42 | NM_000102.2 | X69816.1 |
| steroid 17-alpha-hydroxylase/17,20 lyase | | | |
| ADP-ribosylation factor 5 (ARF5) | 0.41 | NM_001662. | NM_024149.1 |
| rab12, ras related GTPase | 0.41 | — | M83676. |
| microsomal glutathione S-transferase (GST12; MGST1) | 0.40 | XM_048886.3 | J03752 |
| apolipoprotein A-I precursor (APO-AI) | 0.38 | X02162 | M00001 |
| presenilin 1 (PSNL1; PSEN1; PS1); S182 protein | 0.38 | XM_007441.1 | D82363 |
| amonipeptidase B | 0.38 | \|XM_087242.1 | U61696 |
| leukocyte common antigen-related tyrosine phosphatase | 0.38 | — | U00477.1 |
| (LAR) | | | |
| NADPH-cytochrome P450 reductase (CPR); POR | 0.37 | S90469 | NM_031576.1 |
| protein kinase C delta type (PKC-delta) | 0.36 | NM_006254.1 | M18330 |
| proteasome delta subunit precursor; macropain delta; | 0.36 | X61971.1 | NM_057099.1 |
| multicatalytic endopeptidase complex delta; proteasome | | | |
| subunit Y; proteasome subunit 5; PSMB6 | | | |
| sodium channel SCNB2, beta 2 subunit, brain | 0.36 | AAC05208.1 | NM_012877. |
| retinoid X receptor alpha (RXR alpha; RXRA); NR2B1 | 0.35 | XM_088424.1 | NM_012805.1 |
| PDGF-associated protein | 0.35 | U41745.1 | U41744.1 |
| Na+/K+ ATPase alpha 1 subunit | 0.35 | AAA51801.1 | M28647 |
| RalGDSB; GTP/GDP dissociation stimulator for a ras- | 0.34 | — | NM_019250.1 |
| related GTPase | | | |
| interferon regulatory factor 1 (IRF1) | 0.33 | XM_034862.1 | M34253 |
| LIM domain protein CLP36, homologous to rat RIL | 0.33 | AJ310549.1 | U23769.1 |
| adenylate kinase 3 | 0.33 | XM_016642.3 | NM_13218.1 |
| INOSITOL TRIPHOSPHATE RECEPTOR SUBTYPE 3 | 0.33 | — | L06096.1 |
| endothelin converting enzyme | 0.33 | Z35307.1 | D29683 |
| fibroblast ADP/ATP carrier protein; ADP/ATP translocase | 0.33 | J02683 | D12771 |
| 2; adenine nucleotide translocator 2 (ANT2) | | | |
| cytochrome c oxidase, subunit Va, mitochondrial | 0.31 | M22760.1 | X15030 |
| fatty acid-binding protein (intestinal; I-FABP; FABPI) | 0.31 | M18079 | M18080.1 |
| ornithine decarboxylase (ODC) | 0.31 | X16277 | D11372.1\| |
| antigen peptide transporter 1 | 0.30 | X57522 | P36370 |
| lipocortin 2 | 0.29 | D00017.1 | S73557 |
| signal transducer CD24 precursor; heat stable antigen | 0.28 | P25063 | U49062 |
| (HSA); nectadrin | | | |
| cytoplasmic beta-actin (ACTB) | 0.25 | M10277.1 | V01217 |
| fructose-bisphosphate aldolase B (ALDOB); liver-type | 0.24 | XM_042788.1 | M10149 |
| aldolase | | | |
| granzyme M precursor (GZMM); MET-ASE; natural killer | 0.24 | NM_005317.2 | Q03238 |
| cell granular protease; RNK-MET-1 | | | |
| scavenger receptor class B type I | 0.24 | — | AB002151.1 |
| glutamyl aminopeptidase A | 0.24 | XM_003595.2 | S73583 |
| metalloendopeptidase meprin beta subunit | 0.23 | — | M88601.1 |
| glutathione synthetase (GSH synthetase; GSH-S; GSS); | 0.23 | U34683.1 | L38615.1 |
| glutathione synthase | | | |
| cytochrome oxidase, subunit I, Sertoli cells | 0.23 | S79304 | S79304 |
| CamK I; calcium/calmodulin-dependent protein kinase | 0.23 | Q14012 | L24907 |
| type I + CaM-like protein kinase | | | |
| C-type natriuretic peptide precursor (CNP; NPPC) | 0.22 | NM_024409.1 | D90219 |
| neurotrophin 3 precursor (NTF3); neurotrophic factor; | 0.20 | M37763.1 | M34643 |
| HDNF; nerve growth factor 2 (NGF2) | | | |
| phospholipase C beta 3 (PLC-beta 3) | 0.19 | NM_000932.1 | M99567 |
| ATP synthase, subunit c, P2 gene | 0.19 | D13119.1 | D13124 |
| gelatinase A | 0.19 | NM_004530.1 | U65656 |
| glutathione S-transferase Ya subunit (GST YA); ligandin | 0.18 | NM_000852.2 | K01932 |
| subunit 1 alpha | | | |
| creatine kinase, ubiquitous, mitochondrial | 0.18 | XM_016524.4 | X59737 |
| fatty acid-binding protein (liver; L-FABP); Z-protein; | 0.18 | NM_001443.1 | M35991 |
| squalene- & sterol-carrier protein (SCP); P14 | | | |
| cytochrome P-450 4F1, hepatic tumour | 0.18 | — | NM_019623.1 |
| CamK II; calcium/calmodulin-dependent protein kinase | 0.18 | NM_001220.1 | M16112 |
| brain type II beta | | | |
| sodium-glucose cotransporter 1 | 0.16 | P13866 | U03120 |
| fructose (glucose) transporter | 0.16 | AAB60641 | D13871.1 |
| urate transporter/channel | 0.15 | — | U67958 |
| sodium/potassium-transporting ATPase beta 1 subunit | 0.13 | NM_001677.1 | NM_013113.1 |
| (ATP1B1) | | | |
| fatty acid amide hydrolase | 0.12 | U82535.1 | U72497 |
| proton-coupled dipeptide cotransporter | 0.11 | — | D50306.1 |
| angiotensin converting enzyme (ACE; somatic; dipeptidyl | 0.11 | NM_000789.1 | NM_012544.1 |
| carboxypeptidase I; kininase II | | | |
| apolipoprotein A-IV precursor (APO-AIV) | 0.10 | XM_052144.2 | P02651 |
| ErbB3 EGF receptor-related proto-oncogene; HER3 | 0.08 | M29366.1 | NM_017218.2 |
| Jun-B; c-jun related TF, | ** | M29039.1 | X54686 |
| S-myc proto-oncogene; myc related, | ** | | M29069 |
| C-est-I proto-oncogene; p54. | 5 | AF193068.1 | X55787.1 |
| Jun-D; c-jun related TF, | 1.79 | X56681.1 | D26307(mouse) |
| NF-kappaβ Tf p105 subunit, | 1.67 | P19838 | L26267.1 |
| Nm23-M2; nucleoside diphosphate kinase B; | 1.47 | | X68193.1 |
| metastasis reducing protein, | | | (mouse) |
| STAT 3 —signal transducer and activator of | 1.16 | NM_003150.1 | NM_012747.1 |
| transcription 3, | | | |
| CREB active TF, | 1 | | M34356.1 |
| New england deaconess TF, | 1 | | U09229 |
| Lim-2; embryonic motor neuron topographic | 1 | | L35572 |
| organizer; homeobox protein LIM-2, and | | | |
| NDK-B; nucleoside diphosphate kinase B; | 0.81 | | U29200.1 |
| metastasis reducing protein, | | | |
| C-jun proto-oncogene; TF AP-1; RJG-9, | 0.5 | J04111.1 | X17215.1 |

Symbols indicating fold changes in Table 2:
** expressed in PP but not NPP, or in co-culture but not in Caco-2 cells.
* expressed in co-culture but not in Caco-2 cells (only repeated once).
— expressed in Caco-2 but not in co-culture.

### Example 5

### ATLAS Array Data on Co-Culture of Human Caco-2 Cells and Raji B-Cells

[0108] In order to facilitate the routine study of M cell biology, there was a desire to establish a suitable and representative in-vitro model. In the work carried out by Kernéis et al. (Kerneis S, Caliot E, Stubbe H, Bogdanova A, Kraehenbuhl J, Pringault E (2000). Molecular studies of the intestinal mucosal barrier physiopathology using co-cultures of epithelial and immune cells: a technical update. Microbes Infect Jul. 2, 2000 (9):1119-24), it was reported that Peyer's patch lymphocytes co-cultured with Caco-2 cells trigger the phenotypic conversion of enterocytes into cells that express morphological and functional M-cell properties. This work was further developed by Gullberg et al. (Gullberg E, Leonard M, Karlsson J, Hopkins A M, Brayden D, Baird A W, Artursson P. Expression of specific markers and particle transport in a new human intestinal M-cell model. Biochem Biophys Res Commun Dec. 29, 2000; 279(3): 808-13) to create a simplified in vitro model of the human M-cell. Co-cultures of physically separated human intestinal epithelial Caco-2 cells and B-cell lymphoma Raji cells were established. The co-cultures were characterized under the criteria of morphology, integrity, expression of M-cell markers and cell adhesion molecules (CAMs), and altered particle transport. Using this construct, the epithelial cells were transformed to cells with an M-cell-like morphology and had altered expression of potential human M-cell markers (alkaline phosphatase down-regulation and Sialyl Lewis A antigen up-regulation). The expression of intercellular adhesion molecule-1 and vascular cell adhesion molecule was altered, and there was an increased binding of lectins wheat germ agglutinin and peanut agglutinin with a 40-fold increase in microparticle transport. The particle transport was size-dependent and could be inhibited at 4° C. or by replacing the Raji B-cells with Jurkat T-cells. Thus the comparison of RNA isolated from co-cultured Caco2 cells to that isolated from normal Caco2 cells was designed to simulate a comparison of M cell RNA to normal gut enterocyte RNA.

### Isolation of Total RNA from Co-Cultured Caco-2 Cells

[0109] Caco-2 Cell Culture

[0110] Caco-2 cells were cultured in Dulbecco's Modified Eagles Medium (DMEM), 4.5 g/L glucose supplemented with 1% Mem, 10% FCS and 1% penicillin/streptomycin a t 37° C. and 5% CO₂ in 95% relative humidity. Cells were grown and expended in Falcon culture flasks and passaged once they attained 100% confluence. Caco-2 cells were seeded on Transwell Clear filters (Costar, 12 mm diameter, 3.0 μm pore size)) at a density of 5×10⁵ cells/cm2 and incubated in a 12 well culture plate with a medium change every second day. 1.0 ml was added to the basolateral side and apical sides.

[0111] Raji Cell Culture

[0112] Raji B-lymphoma cells were cultured in RPMI 1640 Medium, with 1% (v/v) non-essential amino-acids, 10% FCS and 1% penicillin/streptomycin, 1% L-glutamine at 37° C. and 5% CO₂ in 95% relative humidity. Cells were grown in suspension in Falcon tissue culture flasks and passaged by dilution every 5-7 days.

[0113] Co-Culture: Day 14 (Treating with Raji B-Cells)

[0114] After 14 days of culturing Caco-2 monolayers, 15-20 ml of Raji cells were removed from the T75 flask and placed in a 20 ml universal. The cells were centrifuged at 1000 rpm for 3 min. Cells were re-suspended at a concentration of 1×10⁶ cells/ml. 1 ml of fresh complete DMEM was added to the apical and basolateral sides of the Caco-2 monolayer filters. 0.5 ml of 1×10⁶ Raji cells/ml cells was added to the basolateral side of the filters. For control filters (non co-culture) 0.5 ml of Raji medium only was added to the basolateral side.

[0115] Isolation of Total RNA from Co-Cultured Caco-2 Cells

[0116] After 4 days of co-culture the filters were rinsed in PBS. 0.5 ml of PBS was added to the apical side of each filter and the Caco-2 cells were scraped off the filter surface into suspension in the PBS. The cells from all the co-cultured Caco-2 filters were pooled, centrifuged at 1000 rpm for 3 min, the supernatant PBS was removed and the pellet was used for RNA extraction.

[0117] Analysis of mRNA Expression

[0118] Total cellular RNA was extracted using an acid guanidinium thiocyanate-phenol-chloroform method. RNA's integrity was confirmed by gel electrophoresis and ethidium bromide staining. mRNA was reverse transcribed in the presence of P³² dATP, and the transcribed cDNA was purified by chromatography before being hybridized over night to the array membrane. Membranes were exposed to x-ray film using an intensifying screen for 3 days and the mRNA expression levels were analyzed by scanning the films with a densitometer. Expression levels were normalized relative to internal standards, and relative increases in mRNA levels in co-cultured cells versus monoculture controls were calculated. Two hybridization experiments were performed using mRNA from two separate cell harvests. Results from the two experiments were pooled, and a summary of the findings was tabulated in Tables 3(a)-3(f). The identified genes are from the following groups: oncogenes, tumor suppressor genes, genes involved in the cell cycle, ion channels and transport, stress response genes, modulators and effectors, genes involved in intracellular transduction, genes linked to apoptosis, DNA synthesis, repair & recombination, transcription factors, DNA binding proteins, receptors, cell surface antigens, genes involved in cell adhesion, growth factors, cytokines, chemokines and hormones.

[0119] In Table 3, genes which were found to be exclusively over-expressed in the co-culture and not in the control Caco-2 monolayer are represented by **. A single asterisk represents genes that also were expressed in the co-culture and not in the control Caco-2 monolayer. However, these particular genes have been distinguished from the genes labeled with two asterisks as they were not expressed in both hybridization experiments performed, and will require confirmation in the future by PCR so as to rule out false positives/negatives. Genes not expressed in the co-culture but expressed in the Caco-2 monolayer controls are indicated by a minus symbol, “−”.

TABLE 3 a
Oncogenes, Tumor Suppressors, Cell Cycle Regulators

| Gene | Fold change | GenBank ID |
|---|---|---|
| Myeloid cell nuclear differentiation | * | M81750 |
| antigen (MNDA) | | |
| G1/S-specific cyclin D1 (CCND1); | * | X59798 |
| cyclin parathyroid adenomatosis 1 | | |
| (PRAD1); bcl-1 oncogene | | |
| cyclin-dependent kinase 4 inhibitor 2 | * | L27211.1 |
| (CDK4I; CDKN2); p16-INK4; multiple | | |
| tumor suppressor 1 (MTS1) | | |
| cyclin-dependent kinase inhibitor 1C | * | U22398 |
| (CDKN1C); p57-KIP2 | | |
| ezrin; cytovillin 2; villin 2 (VIL2) | 1.69 | X51521 |
| proto-oncogene tyrosine-protein | 1.55 | L04143.1 |
| kinase kit; c-kit; mast/stem cell | | |
| growth factor receptor | | |
| precursor(SCFR); CD117 antigen | | |
| proliferating cell nucleolar anti- | 1.52 | M32110 |
| gen P120; NOL1 | | |
| jun proto-oncogene; avian sarcoma | 1.47 | J04111 |
| virus 17 oncogene homolog; | | |
| transcription factor AP-1 | | |
| C-src proto-oncogene (SRC1) | 1.35 | X59932 |
| CDC-like kinase 3 (CLK3) | 1.35 | L29220 |
| cell division cycle protein 25 | 1.34 | M91815.1 |
| nucleotide exchange factor (CDC25) | | |
| prothymosin alpha (PROT-alpha; PTMA) | 1.32 | M26708 |
| 40S ribosomal protein S19 (RPS19) | 1.31 | M81757 |
| avian myelocytomatosis viral | 1.30 | V00568 |
| oncogene homolog (MYC) | | |
| CDC-like kinase 1 (CLK1) | 1.27 | L29219.1 |
| cyclin-dependent kinase 4 inhibitor | 0.69 | U49399.1 |
| 2D (CDKN2D); p19-INK4D | | |
| vascular endothelial growth factor | 0.62 | XM_039993.2 |
| receptor 1 (VEGFR1); tyrosine- | | |
| protein kinase receptor flt + | | |
| soluble VEGFR; tyrosine-protein | | |
| kinase receptor SFLT | | |
| neogenin | — | U61262.1 |
| webB2 receptor protein-tyrosine | — | M11730.1 |
| kinase; neu proto- | | |
| oncogene; c-erbB2 + | | |
| HER2 receptor | | |
| N-ras; transforming p21 protein | — | AAA60255 |

[0120] TABLE 3 b
Ion Channels, Modulators, Effectors

| Gene | Fold change | GenBank ID |
|---|---|---|
| extracellular signal-regulated | ** | X14798.1 |
| kinase 3 (ERK3); mitogen-activated | | |
| protein kinase 6 (MAP kinase 6; | | |
| MAPK6; PRKM6); p97-MAPK | | |
| 40-kDa heat-shock protein 1 (HSP40); | ** | D49547 |
| DNAJ protein homolog 1 (HDJ1; DNAJ1) | | |
| 70-kDa heat shock protein 1 | ** | M11717 |
| (HSP70.1; HSPA1) | | |
| glutaredoxin | ** | X76648 |
| tyrosine kinase receptor tie-1 | * | AAB84296 |
| precursor | | |
| ras-related protein RAB3B | * | NM_002867.1 |
| macMARCKS; MARCKS-related protein | * | P49006\| |
| (MRP); MLP | | |
| mitogen-activated protein kinase 3 | * | P27361 |
| (MAPK3; PRKM3); MAPK1; extra- | | |
| cellular signal-regulated kinase | | |
| 1 (ERK); microtubule-associated | | |
| protein 2 kinase, insulin- | | |
| stimulated MAP2kinase | | |
| mitgoen-activated protein kinase 9 | * | NM_002752.1 |
| (MAP kinase 9; MAPK9; PRKM9); c-jun | | |
| N-terminal kinase 2 (JNK2); JNK55 | | |
| 60-kDa heat shock protein (HSP60); | * | M22382.1 |
| HSPD1; 60-kDa chaperonin; | | |
| mitochondrial matrix protein | | |
| P1 precursor; p60 lymphocyte | | |
| protein; HUCHA60; GROEL | | |
| serine kinase | 2.24 | U09564.1 |
| transferrin receptor (TFRC); CD71 | 1.80 | M11507.1 |
| antigen | | |
| Neurotrophic tyrosine kinase | 1.63 | U55017.1 |
| receptor-related 3: TKT percursor | | |
| phospholipase C (PLCL) | 1.62 | X14034. |
| cAMP-response element binding | 1.59 | M27691.1\| |
| protein (CREB) | | |
| ephrin type-A receptor 1 precursor; | 1.55 | M18391 |
| tyrosine-protein kinase receptor eph | | |
| 27-kDa heat-shock protein (HSP27); | 1.42 | X54079.1 |
| stress-responsive protein 27 | | |
| (SRP27); estrogen-regulated 24-kDa | | |
| protein; HSPB1 | | |
| tyrosine kinase tnk1 | 1.42 | XM_012654.3 |
| ras-related protein RAB3A | 1.38 | XM_054457.2 |
| janus kinase 3 (JAK3); leukocyte | 1.33 | XM_038595.3 |
| janus kinase (L-JAK) | | |
| dual-specificity mitogen-activated | 1.29 | NM_002755.2 |
| protein kinase kinase 1 (MAP kinase | | |
| kinase 1; MAPKK 1; MKK1); | | |
| extracellular signal-regulated | | |
| kinase 1; ERK activator kinase 1 | | |
| calcium/calmodulin-dependent protein | 1.27 | NM_001744.1 |
| kinase type IV catalytic subunit | | |
| (CAMK IV); CAM kinase-GR | | |
| ras-related protein RAB5A | 0.75 | XM_053461.2 |
| colon carcinoma kinase 4 precursor | 0.68 | U33635.1 |
| (CCK4) + transmembrane receptor | | |
| PTK7 | | |
| epithelial discoidin domain receptor | 0.63 | XM_004559.5 |
| 1 precursor (EDDR1; DDR1); cell | | |
| adhesion kinase (CAK); TRKE; | | |
| RTK6; protein tyrosine kinase 3A | | |
| (PTK3A); neuroepithelial tyrosine | | |
| kinase (NEP) | | |
| ras-related protein RAB6 | 0.27 | M28212.1 |
| cAMP-dependent protein kinase type I | 0.23 | M65066.1 |
| beta regulatory subunit (PRKAR1B) | | |
| tyrosine-protein kinase ack | — | CAC15525 |
| T-lymphocyte maturation-associated | — | P21145 |
| protein MAL | | |
| orphan hormone nuclear receptor | — | U04897.1 |
| LIM domain kinase 1 (LIMK-1) | — | P53667 |
| protein kinase C alpha polypeptide | — | NM_002737.1 |
| (PKC-alpha; PKCA) | | |
| dual specificity mitogen-activated | — | P46734 |
| protein kinase kinase 3 (MAP kinase | | |
| kinase 3; MAPKK3; MKK3); ERK | | |
| activator kinase 3; MAPK/ERK | | |
| kinase 3 (MEK3) | | |
| Yamaguchi sarcoma viral-related | — | M16038.1 |
| oncogene homolog; tyrosine-protein | | |
| kinase lyn | | |
| protein-tyrosine phosphatase 1E | — | U12128.1 |

[0121] TABLE 3.c
Apoptosis, DNA Synthesis, Repair & Recombination

| Gene | Fold change | GenBank ID |
|---|---|---|
| ubiquitin-conjugating enzyme E2 17- | ** | NM_003336.1 |
| kDa (UBE2A); ubiquitin-protein | | |
| ligase; ubiquitin carrier protein, | | |
| HR6A | | |
| growth arrest & DNA-damage-inducible | ** | S40706.1 |
| protein 153 (GADD153); DNA-damage- | | |
| inducible transcript 3 (DDIT3); C/EBP | | |
| homologous protein (CHOP) | | |
| growth factor receptor-bound protein | * | M96995.1 |
| 2 (GRB2); ASH protein | | |
| glutathione S-transferase A1 (GTH1; | * | M21758.1 |
| GSTA1); HA subunit 1; GST-epsilon | | |
| cytoplasmic dynein light chain 1 | * | U32944.1 |
| (HDLC1); protein inihibitor of | | |
| neuronal nitric oxide synthase (PIN) | | |
| xeroderma pidmentosum group G | * | NM_021141.2 |
| complementing protein (XPG); X-ray | | |
| repair-complementing defective repair | | |
| in Chinese hamster cells 5 (XRCC5) | | |
| xeroderma pigmentosum group D | * | AF035587.1 |
| complementing protein (XPD); X-ray | | |
| repair-complementing defective repair | | |
| in Chinese hamster cells 2 (XRCC2) | | |
| RAD23 homolog A (RAD23A; hHR23A) | * | NM_005053.1 |
| ataxia telangiectasia (ATM) | * | AAB38309 |
| apoptosis regulator bcl-x | 1.60 | Z23115.1 |
| caspase 9 percursor (CASP9); ICE-like | 1.42 | AB020979.1 |
| apoptotic protease 6 (ICE-LAP6); | | |
| apoptotic protease MCH6; | | |
| apoptotic protease activating factor | | |
| 3 (APAF3) | | |
| CD40 receptor-associated factor 1 | 1.39 | U21092.1 |
| (CRAF1) | | |
| SL cytokine precursor; FMS-related | 1.35 | NM_001459.1 |
| tyrosine kinase 3 ligand (FLT3 | | |
| ligand; FLT3LG) | | |
| cytochrome P450 reductase | 1.33 | AAD45961.1 |
| X-ray repair complementing defective | 1.25 | M36089 |
| repair in | | |
| Chinese hamster cells 1 (XRCC1) | | |
| Ku (p70/p80) subunit; ATP-dependent | 0.74 | X57500.1 |
| DNA helicase II 86-kDa subunit; lupus | | |
| ku autoantigen protein; thyroid-lupus | | |
| autoantigen (TLAA); CTC box | | |
| binding factor 85-kDa subunit (CTCBF; | | |
| CTC85); nuclear factor IV | | |
| caspace 10 precursor (CASP10); ICE- | 0.45 | Q92851 |
| LIKE apoptotic protease 4 (ICE-LAP4); | | |
| apoptotic protease MCH4; fas- | | |
| associated death domain | | |
| protein; interleukin 1 beta- | | |
| converting enzyme 2 (FLICE2); | | |
| inhibitor of apoptosis protein 2 | — | Q13490 |
| (HIAP2; IAP2) + IAP homolog B; | | |
| TNFR2-TRAF signaling complex | | |
| protein 2; MIHB | | |
| recA-like protein HsRad51; DNA repair | — | BAA02962.1 |
| protein RAD51 homolog | | |
| DNA damage repair & recombination | — | B56529 |
| protein 52 (RAD52) | | |
| DNA ligase III (LIG3); polydeoxyribo- | — | CAA59230.1 |
| nucleotide synthase | | |

[0122] TABLE 3 d
Transcription Factors, DNA Binding Proteins

| Gene | Fold change | GenBank ID |
|---|---|---|
| transcriptional activator hSNF2-alpha | ** | D26155.1\| |
| early growth response protein 1 | 2.71 | M62829.1 |
| (EGR1); transcription factor ETR103; | | |
| KROX24; zinc finger protein 225 | | |
| (ZNF225); AT225 | | |
| homeobox A1 protein (HOXA1); HOX1F | 2.17 | U10421.1 |
| transcription factor NF-ATc | 1.67 | U08015.1 |
| R kappa B DNA-binding protein | 1.66 | U08191.1 |
| transcription initiation factor IID | 1.57 | M55654 |
| 31-kDa subunit (TFIID); TATA-box- | | |
| binding protein-associated factor RNA | | |
| polymerase II G 32-kDa subunit | | |
| (TAFII32; TAF2G); TAFII31 | | |
| homeobox protein hLim1; LHX1 | 1.51 | NM_005568.1 |
| helix-loop-helix protein HLH 1R21; | 1.49 | X69111.1 |
| DNA-binding protein inhibitor Id-3; | | |
| HEIR-1 | | |
| guanine nucleotide-binding protein | 1.46 | NP_000507.1 |
| G-s alpha subunit (GNAS); adenylate | | |
| cyclase-stimulating G alpha protein | | |
| CCAAT-binding transcription factor | 1.45 | AAA40889.1 |
| subunit B (CBF-B); NF-Y protein sub- | | |
| unit A (NF-YA); Hap2; CAAT-box DNA- | | |
| binding protein subunit A | | |
| transcription factor LSF | 1.37 | B53771 |
| homeobox 2.1 protein (HOX2A); HOXB5; | 1.35 | M92299.1 |
| HU1; HHO.C10 | | |
| endothelial transcription factor | 1.34 | M68891.1 |
| GATA2 | | |
| transcription factor Sp1 (TSFP1) | 1.30 | XM_028606.2 |
| transcription factor ZFM1 | 0.62 | G02919 |
| zinc finger protein 161 (ZNFI61); | 0.26 | NP_009077.1 |
| putative transcription activator DB1 | | |
| stem cell protein (SCL); T-cell | — | AAA36598.1 |
| leukemia/lymphoma-5 protein (TCL5); | | |
| T-cell acute lymphocytic leukemia-1 | | |
| protein (TAL1) | | |
| neural retina-specific leucine zipper | — | NP_006168 |
| protein (NRL) | | |
| MSX-1 homeobox protein; HOX7 | — | P28360 |
| basic transcription factor 62-kDa | — | AAA58399.1 |
| subunit (BTF2) | | |
| paired box homeotic protein (PAX8) | — | BAB59039.1 |
| isoforms 8A/8B + isoforms 8C/8D | | |
| brain-specific homeobox/POU domain | — | AAA65605.1 |
| protein 3A (brn-3A); RDC-1; octamer | | |
| binding transcription factor 1 (OTF1) | | |
| transcription factor E2-alpha (E2A); | — | AAA61146.1 |
| immunoglobulin enhancer binding | | |
| factor E12; transcription factor-3 | | |
| (TCF3) | | |
| transcriptional enhancer factor | — | P28347 |
| (TEFI); protein GT-IIC; transcription | | |
| factor 13 (TCF13) | | |
| thioredoxin perodxidase 2 (TDPX2); | — | Q06830 |
| thioredoxin-dependent peroxide | | |
| reductase 2; proliferation- | | |
| associated gene (PAG); natural killer | | |
| cell enhancing factor A (NKEFA) | | |

[0123] TABLE 3 e
Receptors, Cell Surface Antigens, Cell Adhesion

| Gene | Fold chance | GenBank ID |
|---|---|---|
| interleukin-2 receptor gamma subunit | * | AAA59145.1 |
| (IL-2R gamma; IL2RG); cytokine | | |
| receptor common gamma chain | | |
| precursor; p64 | | |
| interferon gamma receptor (IFNGR) | * | NM_000416.1\|[ |
| interleukin-1 receptor type I | * | M27492.1 |
| precursor (IL-1R1); IL-1R-aplha; p80; | | |
| CDW121A antigen | | |
| neural-cadherin precursor (N- | * | L34059 |
| cadherin; NCAD); cadherin 2 (CDH2) | | |
| neural cell adhesion molecule L1 | * | M77640 |
| precursor (N-CAM L1); MIC5 | | |
| integrin alpha 3 (ITGA3); galacto- | * | M59911.1 |
| protein B3 (GAPB3); very late antigen | | |
| 3 alpha subunit (VLA3 alpha); CD49C | | |
| antigen | | |
| leukocyte adhesion glycoprotein p150, | * | M81695.1 |
| 95 alpha subunit precursor; leukocyte | | |
| adhesion receptor p150, 95; CD11C | | |
| antigen; leu-M5; integrin alpha X | | |
| (ITGAX) | | |
| integrin beta 4 (ITGB4); CD104 | * | X51841.1 |
| antigen | | |
| CD44 antigen precursor (CD44); | 1.51 | XP_030326.1 |
| phagocytic glycoprotein I (PGP1); | | |
| HUTCH I; extracellular matrix | | |
| receptor III (ECMR III); gp90 | | |
| lymphocyte homing/adhesion receptor | | |
| (LHR); hermes antigen; hyaluronate | | |
| receptor; heparan sulfate | | |
| proteoglycan; epican | | |
| glutamate receptor subunit epsilon 3 | 1.44 | NP_000826.1 |
| precursor (GRIN2C); N-methyl D- | | |
| aspartate receptor subtype 2C | | |
| (NMDAR2C; NR2C) | | |
| CD27L antigen receptor precursor; | 0.7 | P26842 |
| tumor necrosis factor receptor | | |
| superfamily member 7 (TNFRSF7); T14 | | |
| integrin alpha L (ITGAL); leukocyte | 0.45 | P20701 |
| adhesion glycoprotein alpha subunit | | |
| precursor; leukocyte function- | | |
| associated molecule 1 alpha chain | | |
| (LFAI); CD11A antigen | | |
| interleukin 2 receptor alpha subunit | 0.41 | P01589 |
| precursor (IL-2 receptor alpha | | |
| subunit; IL2RA); TAC antigen; CD25 | | |
| antigen | | |
| CDW40 antigen; CD40L receptor | 0.35 | CAA43045.1 |
| precursor; nerve growth factor | | |
| receptor-related B-lymphocyte | | |
| activation molecule | | |
| granulocyte colony stimulating factor | — | Q99062 |
| receptor precursor (GCSF-R); CD114 | | |
| antigen | | |
| low-affinity nerve growth factor | — | AAB59544.1 |
| receptor (NGF receptor; NGFR); GP80- | | |
| LNGFR | | |
| neuromedin B receptor (NMBR); | — | NP_002502.1 |
| neuromedin-B-preferring bombesin | | |
| receptor | | |
| granulocyte-macrophage colony- | — | Q00941 |
| stimulating factor receptor alpha | | |
| (GM-CSFR-alpha); CSW116 antigen | | |
| platelet membrane glycoprotein IIIA | — | P05106 |
| precursor (GP3A); integrin beta 3 | | |
| (ITGB3); CD61 antigen | | |
| integrin alpha 7B precursor (IGA7B) | — | CAA52348.1 |

[0124] TABLE 3 f
Growth Factors, Cytokines, Hormones

| Gene | Fold change | GenBank ID |
|---|---|---|
| Interleukin-10 precursor (IL-10); | ** | M57627 |
| cytokine synthesis inhibitory factor | | |
| (CSIF) | | |
| Granulocyte-macrophage colony | * | AAA52578.1 |
| stimulaitng factor (GM-CSF); CSF2 | | |
| FMLP-related receptor I (FMLPRII); | * | AAA58482.1 |
| RMLP-related receptor I (RMLPRI) | | |
| Glia maturation factor beta | * | P17774 |
| (GMF-beta) | | |
| Hepatoma-derived growth factor (HDGF) | * | P51858 |
| Macrophage inflammatory protein 1 | * | P10147 |
| alpha precursor (MIP1-alpha); | | |
| tonsillar lymphocyte LD78 alpha | | |
| protein; G0S19-1 protein; PAT 464.2; | | |
| SIS-beta; small inducible cytokine | | |
| A3 (SCYA3) | | |
| Monocyte chemotactic protein 1 | * | P13500 |
| precursor (MCP1); monocyte | | |
| chemotactic and activating factor | | |
| (MCAF); monocyte secretory protein | | |
| JE; monocyte chemoattractant protein | | |
| 1; HC11; small inducible cytokine A2 | | |
| (SYCA2). | | |
| Oncostatin M (OSM) | * | NP_065391.1 |
| Renin-binding protein (RENBP; RNBP) | | XP_013053.3 |
| Calgranulin B (CAGB); migration | 1.49 | B31848 |
| inhibitory factor-related protein 14 | | |
| (MRP14); leukocyte L1 complex heavy | | |
| chain; S100 calcium binding protein | | |
| A9 (S100A9) | | |
| Placenta growth factors 1 + 2 | 1.42 | CAA38698.1 |
| (PLGF1 + PLGF2) | | |
| Vascular endothelial growth factor | 1.42 | AAA35789.1 |
| precursor (VEGF); vascular | | |
| permeability factor (VPF) | | |
| Hepatocyte growth factor activator | 1.40 | BAA74450.1 |
| (HGF activator) | | |
| Follistatin-related protein precursor | 1.34 | AAA66062.1 |
| Hepatocyte growth factor-like protein; | 1.29 | AAA59872.1 |
| macrophage stimulating protein (MSP) | | |
| Interferon gamma precursor (IFN- | 1.29 | P01579 |
| gamma, IFNG); immune interferon | | |
| WSL protein + TRAMP + Apo-3 + | 0.69 | AAB41432.1 |
| death domain receptor 3 (DDR3) | | |
| Neurotrophin-4 (NT4) | 0.68 | AAA60154.1 |
| Interleukin-13 precursor (IL-13); | 0.39 | P35225 |
| NC30 | | |
| Small inducible cytokine A5 (SYCA5); | 0.38 | XP_035842.1 |
| regulated on activation normal T- | | |
| cell-expressed & secreted | | |
| protein precursor (RANTES); SIS delta | | |
| Estrogen sulfotransferase (STE; EST1) | — | CAA72079.1 |
| Keratinocyte growth factor (KGF); | — | AAA63210.1 |
| fibroblast growth factor 7 (FGF7) | | |
| Endothelial-monocyte activiting | — | AAA62202.1 |
| polypeptide II (EMAP II) | | |
| Leukemia inhibitory factor precursor | — | B36282 |
| (LIF); differentiation-stimulating | | |
| factor (D factor); melanoma derived | | |
| LPL inhibitor (MLPLI); HILDA | | |
| Acidic fibroblast growth factor | — | AAA51672.1 |
| (AFGF) + heparin-binding growth | | |
| factor 1 precursor (HBGF-1) + | | |
| beta-endothelial cell growth | | |
| factor (ECGF-beta) | | |
| Insulin-like growth factor-binding | — | P17936 |
| protein 3 precursor (IGF-binding | | |
| protein 3; IGFBP3; IBP3) | | |

Symbols (Fold Changes)
**Expressed in PP but not NPP, or in Co-culture but not Caco2.
*Expressed in Co-culture but no Caco2 (only repeated once)
—Expressed in Caco2 but not in co-culture.

### Immunity

[0125] The events of the cell cycle occur under normal circumstances in a fixed sequence. Traditionally, the cycle is divided into two stages: cell division and the interphase. Cell division or mitosis is followed by cytokinesis and together they constitute the ‘M phase’ of the cell cycle. The interphase is divided up into the S, G₁ and G₂ phases. Briefly, during the S phase, DNA is replicated in preparation for mitosis, while the intermediate G phases are transitional periods involved in protein synthesis and cell growth. Activation of regulatory genes that control and maintain a cell's proliferative state by intracellular signals (discussed below) stimulates proliferation of the cell and initiates cell growth. A number of genes involved in these processes were differentially expressed in the co-culture model (as estimated by relative mRNA abundance) and discussed below.

[0126] The epithelial cells of the gut play an important part of the innate and specific immunity. IEC's are considered to be in a continuous controlled state of “physiological” inflammation and active processes continually take place to ensure that the tone of immunosuppression is maintained (Mayer, 2000). These unique regulators appear to control the mucosal immune system's condition. These distinct factors govern the immune response, whether it's immune suppression/tolerance, inflammation or a systemic immune response. A clearer understanding of the immunoregulatory features involved in mucosal immunity is clearly desirable and may lead to new approaches in disease and drug therapy. Genes detected in the co-culture model that may be related to or are involved in immune function in GALT are discussed below.

[0127] The gamma subunit if IL-2 receptor plays a pivotal role in formation of the full-fledged IL-2 receptor (Di Santo et al., 1995). In an interesting study where infant rats were studied from pre- to post weaned life Masjedi et al. (1999) assessed alterations in expression and phenotype of cells in the gut-associated lymphoid tissue. At an age when the immune system is believed to be immature and functionally naive they discovered interleukin-2 receptor (IL-2R) expression peaked approximately four-fold at midweaning in Peyer's patches, compared with adult animals (day 70) suggesting that IL-2R expression is an adaptation to the host's environment. In a similar way, the presence of IL-2R specific for cells in the co-culture could be a direct result of the environment. The common gamma c chain of the interleukin 2 receptor, gamma is also a component of the receptors for IL-4, 1 L-7, and IL-9 and plays a critical role in lymphoid development through its participation in the receptors for IL-2, IL-4, IL-7, IL-9, and IL-15 (Di Santo et al., 1995)

[0128] Interferon-γ (IFN-γ) exhibits various properties including antigrowth activity in neoplastic and normal cells, and regulatory roles in immune responses (Tsuji et al., 1998). Kjerrulf et al. (1997) found that in IFN-γ receptor knockout mice (IFN-γR^{-/-}) reduced mucosal antibody responses and decreased Th1 and Th2 activity after oral immunization. The presence of IFN-γ receptor in the M cell co-culture model could possibly augment a cross-regulation between the two Th subsets in the gut mucosa. It is noteworthy that the ligand, IFN-γ, mRNA was increased in the co-culture that was supported further by the significant secretion of IFN-γ from co-culture monolayers.

[0129] The C-C chemokines macrophage inflammatory protein 1 (MIPLα) and monocyte chemotactic protein (MCP1) are synthesized and expressed by epithelial cells (Vainer et al., 1998; Kolios et al., 1999). The purpose of these chemokines expression in the co-culture model could be to function not only in leukocyte migration, but also as adhesins in the interaction between leukocytes and colonic epithelium. However, another C-C chemokine, RANTES, mRNA was observed to be reduced in the co-culture. The reasons for this are unclear. Perhaps, the chemoaffractant activities of other chemokines such as IL-8, MIP1α and MCP1 are sufficient for the M cell and in the absence of T cells the need for RANTES is not required.

[0130] From a gene delivery perspective, a higher capacity for translation and protein synthesis in PP tissue indicates that PP tissue is a preferred tissue to which to deliver genes coding for DNA vaccines or antigens. Thus the proposed higher translational capacity of PP tissue has implications for gene delivery especially DNA vaccine delivery and correspondingly antigen expression and local presentation to the mucosal immune system in the gastrointestinal tract. The TF coding genes may be important in priming M cells or precursor cells to M cells to adopt M cell phenotype and/or to facilitate priming of M cells to give a better immune cell outcome.

[0131] M cell receptors identified in Table 3(e) above are of particular interest in that they can be used for vaccine and delivery.

[0132] In view of the foregoing, in the method of the invention for increasing the level of a protein in a PP cell, which comprises delivering a nucleic acid coding for a protein, the protein may be selected from the group consisting of an IL-2 receptor, a gamma c chain of an IL-2 receptor, intereron-γ, and a C—C chemokine.

### Proliferation and Growth

[0133] Cyclin DI is a protein involved in regulation of the cell cycle. Over-expression of the protein is associated with abnormal growth or neoplasia. This protein is positively induced by the p42/p44 MAP kinases (Lavoie et al., 1996). It would be interesting if the neoplasia seen in M cells resulted from activation of this protein considering the coincidental induction of the p44 MAP kinase (ERK1) below. The reduction in cyclin-dependent kinase 4 inhibitor 2D (CDKN2D) mRNA that normally inhibits cell cycle progression (Guan et al., 1996) would insinuate a similar function in the proliferation of these ‘M cells.’

[0134] In contrast, the induction of cell cycle inhibitors such as cyclin-dependent kinase inhibitor (CDKI) and cyclin-dependent kinase 4 inhibitor (CDK4J) would appear to be working to counterbalance proliferative stimuli present in the M cell.

[0135] PLC-L (phospholipase C-deleted in lung carcinoma) is a putative tumor suppressor gene. It is believed that irregular (in fact deletion) expression of the PLC-L gene contributes to the growth of human lung carcinoma (Kohno et al., 1995). It is possible then that its upregulation in the M cell model is acting as a negative regulator of growth in the cells, counterbalancing the many proliferative signals present.

[0136] Growth factor receptor-bound protein 2, GRB2, involved in growth factor control of ras signalling (Lowenstein et al., 1992).

[0137] The intracellular signaling pathways responsible for cell cycle arrest and establishment of differentiated cells along the gut axis remain largely unknown particularly in the case for the development of M cells and the FAE. ERK3/MAPK6 is expressed solely in the co-culture. Extracellular signal-regulated kinases-1 (ERK1) also known as the p44 mitogen-activated protein (MAP) kinase (p44mapk) is also induced specifically in the co-culture model. ERK1 and ERK3 are proline-directed serine/threonine kinases that are activated in response to a variety of extracellular signals, including growth factors, hormones and, neurotransmitters. These MAP kinases are key molecules involved in intracellular signal transduction, and are key regulators of cell proliferation in mammalian cells (Davis, 1995). Results indicate that elevated p42/p44 MAPK activities stimulate cell proliferation of intestinal cells, whereas low sustained levels of MAPK activities have correlated with cell cycle arrest and an increased expression of sucrase isomaltase (Aliaga et al., 1999). It is tempting to speculate that the presence of ERK3 together with the other MAP kinases apart from their proliferative effects are in part responsible for a reduction in sucrase isomaltase, a characteristic effect in M cells.

[0138] Lying upstream in the ERK signal cascade the tyrosine/threonine protein kinase, MAPK kinase (MAPKK1) is implicated in the regulation of cell growth and differentiation through the activation of ERK. In addition it is interesting to note that MAPKK3 was deleted in the co-culture cells. MAPKK3 phosphorylates and activates p38 MAP kinase alpha and gamma isoforms (Enslen et al., 1998). The induction of the MAPKK1 gene along with serine kinase coincides with the induction of ERK1, highlighting the ERK cascade as an important signalling cascade in M cell maintenance. It is interesting to note that ERK activation is responsible for terminal differentiation of components of the crypt-villus. (Taupin and Podolsky, 1999)

[0139] However, glia maturation factor-β (GMF-β) is potentially offsetting the ERK cascade effects. It is known to inhibit MAP kinases particularly ERK1 and ERK2 and yet promotes the p38 MAPK (Zaheer and Lim, 1996 and 1998).

[0140] Findings suggest that positive and negative regulation of MAPK activity are associated with loss of normal growth control and may be involved in carcinogenesis of colon cancers. Jun kinases such as JNK2 (MAP kinase 9) mediate signal transduction of pro-inflammatory cytokines and cellular stress (Uciechowski et al., 1996).

[0141] CD40 is a receptor on the surface of B-lymphocytes, the activation of which plays critical role in B cell proliferation and differentiation. CRAF1, (CD40 receptor-associated factor 1) encodes a protein that interacts directly with CD40 receptor (Cheng et al., 1995). Its upregulation in the co-culture is perhaps a main determinant of lymphoepithelial crosstalk as discussed above.

[0142] The c-myc gene is commonly amplified and over-expressed in many human tumors (Ryan and Birme, 1996). A member of the myc family of helix-loop-helix transcription factors, c-myc is integral in controlling cell growth and promotes cell proliferation and transformation by activating growth-promoting genes (Thompson, 1998). Prothymosin-α (PT-α) is a nuclear protein and its expression is associated with alterations in the proliferative state of cells and has been reported to be regulated by the c-myc gene in vitro. (Smith, 1995; Mon et al., 1993). The increased activity of c-myc in this model is likely to result in the increase in RT-α mRNA.

[0143] PKC-α protein levels regulate certain pathways that lead to the expression of differentiation-dependent genes. In a series of antisense transfection experiments where PKC-α expression in CaCo-2 cells was almost completely deleted, enhanced proliferation and a marked decrease in differentiation was observed, as well as a more aggressive transformed phenotype (Scaglione-Sewell et al., 1998). In a similar fashion, the lack of PKC-α mRNA detected in the co-culture ‘M cells’ may underlie some of the phenotype changes featured.

[0144] Glutathione S-transferase A1 (GSTA1) is a member of a multigene family of detoxification and metabolizing enzymes. Induction of GST enzyme activity has been demonstrated to act as a potent anti-proliferative and differentiating agent in Caco-2 cells (Stein et al., 1996) suggesting a similar role in the ‘M cell.’

[0145] Transcription factor GATA-2 is thought to maintain and promote the proliferation of early haematopoietic progenitor cells.

[0146] The placenta growth factor (PLGF) is a member of the vascular enciotheial growth factor (VEGF) family of growth factors. In addition to PLGF, VEGF mRNA was enhanced in the co-culture cells. These growth factors play a crucial role in angiogenesis during development and/or repair (Andre et al., 2000). The augmented transcription of their mRNA is consequently not a surprising find. However, hypoxia and energy depletion are known to induce angiogenesis by increasing VEGF, expression and so the possibility that the co-culture conditions are responsible for these genes induction cannot be ruled out ratherthan a deliberate mechanism of neogenesis in M cell formation. VEGF receptor 1 (VEGFR1); the receptor for VEGF and PLGF, mRNA is down-regulated and is possibly a consequence of desensitization of the receptor by VEGF and PLGF binding, initiating a reduction in the receptor's RNA.

[0147] Coinciding with the above actions, the absence of growth factors such as insulin-like growth factor-binding protein 3 (IGFBP3) and keratinocyte growth factor (KGF) may be modulating enterocytic cell proliferation and differentiation.

[0148] Caco-2 cells have been shown to express the type I IL-1 R. (Varilek et al., 1994) II-1Rα binds IL-1 and mediates cell signalling particularly signalling involved in cell proliferation (French et al., 1996). The expression of IL-1 R can be enhanced by IFN-γ (Varilek et al., 1994). Therefore, the expression of IL-1 R type 1 mRNA in the co-culture is interesting when considering the significant expression of IFN-1 expressed in supernatants of the co-culture model.

[0149] In view of the foregoing, in the method of the invention for increasing the level of a protein in a PP cell, which comprises delivering a nucleic acid coding for a protein, the protein may be selected from the group consisting of cyclin D1, PLC-L, GRB2, ERK3/MAPK6, ERK1, ERK3, JNK2, CD40, CRAF1, C-MYC, PT-α, IL-R, PKC-α, GSTA1, GATA-2, and PLGF.

### Differentiation

[0150] Development of cells or differentiation is dictated by the expression of a cell's genes specific to that cell. This is a particularly important aspect with regards to M cells.

[0151] The cortical cytoskeleton not only provides structural support to the plasma membrane but also contributes to important dynamic processes such as endocytosis, exocytosis, and transmembrane signalling pathways. Ezrin, or villin 2, is an F-actin associated molecule and is concentrated in surface projections such as microvilli and membrane ruffles where they link the microfilaments to the membrane and has been reported to be in abundance during development and differentiation of the intestinal epithelium. It was reported that hepatocyte growth factor (HGF/SF) could stimulate the tyrosine phosphorylation of ezrin in a human colon epithelial cell line, which induced the ezrin associated membrane ruffling. It is interesting to note that both hepatocyte growth factor activator (HGF activator) and hepatocyte growth factor-like protein were both upregulated in the co-culture model and taken with the augmented ezrin mRNA the induction of these genes would appear to underlie the mechanism involved in the morphogenesis observed in M-cells.

[0152] These data demonstrate that the expression of the ezrin gene is being regulated at the level of mRNA due to effects incurred by the B-cells. It is particularly relevant considering the observations of villin diffusely displayed in M-cells.

[0153] One method of actin cytoskeletal reorganization is controlled by the LIMK-1 serine/threonine kinase, which acts by phosphorylating cofilin and subsequently Rac (as previously reported). However, LIMK-1 was deleted in the co-culture model and would appear to rule out the Rac-mediated mechanism of actin reorganization in the M cell model.

[0154] The cadherin family of cell adhesion molecules play important role in cell-cell adhesion during tissue differentiation. They have been reported to be linked to the actin cytoskeleton by catenins located in the cytoplasmic compartment of the cell. The specific expression of NCAD in the co-culture suggests a distinct gene involved in the cytoskeletal structure.

[0155] Previous reports have shown that neogenin is closely related to the human tumor suppressor molecule DCC (deleted in colorectal cancer) and together they constitute a subgroup of Ig superfamily proteins that have shown to be essential for terminal differentiation of specific cell types in the adult including the human colon. These parallels suggest that neogenin, like DCC, is functionally involved in the transition from cell proliferation to terminal differentiation of specific cell types. Its absence in the co-culture model might represent a period of continued proliferation for the cells and allow a longer period of proliferation.

[0156] The helix-loop-helix (HLH) family of transcription factors has been shown by others to play a central role in the regulation of cell growth, differentiation and tumorigenesis. Of particular interest, when HLH 1 R21 was over-expressed in mouse NIH3T3 cells, it induced a morphologically transformed phenotype.

[0157] Other genes associated with differentiation including Myeloid cell nuclear differentiation antigen (MNDA) and the LHX1 gene. The LHX1 gene is a member of the LIM/homeobox (Lhx) gene family. It has been shown that it codes for a transcriptional regulatory protein involved in the control of differentiation and development.

[0158] In view of the foregoing, in the method of the invention for increasing the level of a protein in a PP cell, which comprises delivering a nucleic acid coding for a protein, the protein may be selected from the group consisting of HGF activator, ezrin, NCAD, MNDA, and LHX1.

### Adhesion

[0159] It is clearly evident that modification of the M cell apical surface is a determining factor in M cell apical membrane adherence, and thus, uptake and transport of macromolecules/microorganisms and targeting epitopes on the surface of M cells has been used to promote further adherence and uptake of particles in vaccinology. The specificity of these markers is not only useful for vaccine strategies but also represents targets for understanding adhesion and uptake of bacteria and viruses. Adhesion is not privy to the apical surface. Adhesion molecules on the basolateral surface of M cells, such as cadherin 2, neural cell adhesion molecule, integrin alpha 3, leukocyte adhesion glycoprotein p150, integrin beta 4 are understood to be involved in leukocyte migration and in the development/organization of lymphoid nodules in Peyer's patches. Genes expressed/induced in the co-culture can provide an insight into the mechanisms involved and are discussed below.

[0160] The tyrosine kinase receptor TIE 1 is normally located in vascular endothelial and haematopoietic cells and is largely involved in the proliferation and differentiation of miniature haematopoietic cells and would be an appropriate gene specific for M cells. In the brain, TIE mRNA and protein is significantly elevated in lesions composed of abnormal vasculature called arterioyenous malformations (AVMs) and the surrounding vasculature. Like AVMs, the significant upregulation of TIE in M cells may indicate some ongoing neogenesis, and depending on the receptor's polarity could be of potential use in vaccine targeting.

[0161] The neuronal cell adhesion molecule L1 (NCAML1) is a transmembrane glycoprotein belonging to the immunoglobulin superfamily and is generally associated with development of the nervous system. As a potent promoter of neurite growth, it is allied with plastic changes. In nerve growth it interacts with the actin cytoskeleton via an ankyrin linkage and promotes specific distribution of F-actin. Such flexibility is ideal in the M cell scenario.

[0162] The integrin family consists of a series of related alpha beta heterodimers involved in a variety of cell-matrix and cell-cell adhesion functions. The α₃β₁ integrin is a multiligand extracellular matrix receptor found on many cell types and can function as a receptor for fibronectin, laminin, and collagen. Phagocytosis of molecules by breast cells has also been reported to involve this adhesion molecule, thus, it would appear a suitable candidate as an adhesion target on M cells.

[0163] The leukocyte adhesion glycoprotein p150 (CD11 C antigen), also a member of the integrin family, is involved in leukocyte sequestration via interaction of CD11/CD18 similar to that of ICAM-1.

[0164] In stratified epithelia p4 integrin (CD104 antigen) has been shown to be important for proper differential expression and crucial for stable adhesion to die basement membrane through its ability to attach externally to laminin and internally to the keratin cytoskeleton. Interestingly, during human intestinal organogenesis receptors have been shown to occur. This integrin would appear to play an important role in epithelial cell-matrix interactions during development but particularly in M cell development.

[0165] CD44 is a major surface adhesion molecule involved in cell-cell and cell-matrix interactions and lymphocyte homing and activation. The observed enhanced expression suggests that this molecule is an important feature in the activities of M cells. A non-receptor tyrosine kinase, C-src protooncogene (SRC1) has been shown to cause overexpression of CD44 in the intestine. As well as its effects on proliferation, the enhanced activity of SRC1 seen in the M cell model would appear to have major effects on cell adhesion properties of the M cell. Hepatocyte growth factor activator (HGF activator) is a serine protease produced and normally secreted by the liver. It has been documented as stimulating reparative processes in intestinal epithelial cells and could be why its activity is enhanced in this model. However, stimulation of CD44 in colonic epithelial cells has been reported to augment c-met, the HGF receptor. This in turn stimulates the “inside-out signalling causing an amplified expression of integrins that leads to an increase in vascular adhesion to the epithelium.

[0166] It has been reported that the glutamate receptor (NMDA) is generally associated with learning and memory, highly plastic processes in the brain. The high density of NMDA receptors reflects similar plastic changes seen in the co-culture model but would also act as a target epitope for drug delivery.

[0167] TKT is a tyrosine-kinase receptor related to TRK and is a member of cell adhesion kinase receptor family. Ephrin (type A) is a tyrosine kinase receptor that has been reported to be involved in neogenesis and tumor formation. Sp1 is a nuclear protein constitutively expressed and mediates basal promoter activity and is the main Vitamin-D receptor promoter in intestine. These are all potential target sites relevant to M cells.

[0168] Many of the receptors/cell surface antigen ‘deleted’ (not detectable) in the co-cultures could be putative negative markers of M cells. A good example is the laminin receptor a₇β₁ integrin. Expression of the a₇β₁ integtin correlates with human intestinal cell differentiation and could be used in a similar fashion that was applied with sucrase isomaltase and alkaline phosphatase.

[0169] In view of the foregoing, in the method of the invention for increasing the level of a protein in a PP cell, which comprises delivering a nucleic acid coding for a protein, the protein may be selected from the group consisting of cadherin 2, neural cell adhesion molecule, integrin alpha 3, leukocyte adhesion glycoprotein p150, integrin beta 4, TIE, NCAML1, α3β1 integrin, CD11C antigen, CD104 antigen, CD44, NMDA, TKT, ephrin (type A), and Sp1.

### Transport

[0170] The RAB proteins are reported to be regulators of polarized membrane traffic in epithelial cells. The RAB3B is localized to the apical pole very near the tight junctions between adjacent epithelial cells where it is reported to be a possible regulator of apical and/or jupctional protein traffic in epithelial tissues. RAB3B is highly homologous to a brain-specific RAB3 isoform (RAB3A) that targets the presynaptic nerve terminal, where it is reported to regulate exocytosis.

[0171] In polarized cells, the small GTPase Rab5a is localized to the plasma membrane, clathrin-coated vesicles, and early endosomes and is a regulator of transport between the plasma membrane and early endosomes. The decreased expression of RAB5a seen in the co-culture may deregulate the rate of endocytosis and/or vesicle fusion and could possibly release ‘the brake’ on vesicle trafficking.

[0172] RAB6 is another ras related protein also a regulator of intracellular transport in mammalian cells. It controls intra-Golgi transport, either acting as an inhibitor in anterograde transport or as a positive regulator of retrograde transport. Like RAB5a, the pronounced decrease seen in mRNA transcription could be a means of subverting transport regulation in epithelial cells and so optimize the process as observed in M cells.

[0173] Protein kinase C (PKC) and the actin cytoskeleton are critical effectors of membrane trafficking in mammalian cells. The F-actin cross-linking protein myristoylated alanine-rich C kinase substrate (MARCKS), a substrate for PKC, has been reported to be a component of the mechanism of endocytosis.

[0174] TIR or p71 plays a key role in the control of cell proliferation through the binding of transferrin, the major iron-carrier protein. Located on both apical and basolateral surfaces, the transferring receptor has the ability to internalize and recycle to the surface. Indeed experiments by Hughson and Hopkins (1990) demonstrate pathways from the apical and basolateral surfaces meet in an endosomal compartment. Furthermore, Shah and Shen (1994) discovered that the fungal metabolite brefeldin A (BFA) could relocate receptor distribution and enhance TfR mediated transcytosis. The increased expression of this mRNA in the M cell model suggests a potential delivery mechanism of protein drugs across the intestinal epithelium present in M cells that could be exploited.

[0175] In view of the foregoing, in the method of the invention for increasing the level of a protein in a PP cell, which comprises delivering a nucleic acid coding for a protein, the protein may be selected from the group consisting of a RAB protein, PKC, and TfR.

### Signal Transduction

[0176] In order for a cell to respond to extracellular signals, which cause it to alter gene expression or cellular function, it must involve the activation of a signal transduction cascade. There are many different types of signalling cascades, which can be unique to a specific type of stimulus. There are two main mechanisms by which these cascades transmit their signal, either through the regulation of enzymes, which produce second messenger molecules or through the regulation of protein phosphorylation. The activation of these cascades is usually mediated through specific cell surface or intracellular receptor proteins. The receptor protein recognizes the incoming extracellular signal and responds accordingly, initiating a specific series of intracellular signal that direct the cell's behavior. A number of genes involved in intracellular signalling were upregulated or induced in the M cell model and are discussed below.

[0177] A member of the Janus family of tyrosine kinases, which are non-receptor protein kinases, Jak3 is involved in intracellular signalling mediated by cytokines and growth factors such as IL-2, IL-4, and IL-7. Jak3 has been reported to play a crucial role in Peyer's patch organogenesis. Mutant mice deficient in Jak3 presented defects in lymphocyte production and the absence of Peyer's patch structures. Its induced expression suggests a greater level of activity and possibly a major requirement underlying the M cell phenotype ‘switch’.

[0178] The nuclear zinc-finger transcription factor, early growth response factor-I (EGR-1) is an immediate-early gene product expressed in response to diverse stimuli and is involved in growth, development, and differentiation. EGR-1 has been reported to function in growth regulation and suppression of cell transformation by transactivation of the TGFβ gene. TGFβ is capable of stimulating the synthesis of extracellular matrix proteins that can potentially stabilize epithelial cell contact with the substratum. In addition EGR-1 also plays a role in the immune response, regulating targets such as IL-2, CD44, ICAM-1, and TNF. Taken together the considerable induction of EGR-1 mRNA emphasizes the importance of this protein's involvement in M cell behavior.

[0179] CaM kinase IV (CAMK IV) is involved in Ca2+-dependent mechanism for regulating MAP kinase pathways. Many kinases activity has been observed to be enhanced in this model and so it is logical that CAMK IV expression is induced as a requirement to function.

[0180] The tyrosine kinase Tnk1 has been reported to be involved in signalling pathways involving development in adult tissues and in cells of the lymphohaematopoietic system.

[0181] Epithelial discoidin domain receptor 1 (EDDR1) mRNA was reduced in the co-culture. EDDR1 is a collagen receptor involved in controlling cellular responses to the extracellular matrix (ECM). The decrease in this gene would implicate it in the reorganization of the M cell in relation to the ECM.

[0182] cAMP-dependent protein kinase type I beta regulatory subunit (PRKAR1 B) stimulates growth by modulating the signalling of camp via its regulation of cAMP-dependent protein kinase (PKA). PRKAR1 B's reduction in the co-culture model may represent an inhibitory role in the cell's growth counterbalancing the proliferative signals.

[0183] In view of the foregoing, in the method of the invention for increasing the level of a protein in a PP cell, which comprises delivering a nucleic acid coding for a protein, the protein may be selected from the group consisting of Jak 3, EGR-1, TNK1 and CAMK IV.

### Protection and Repair

[0184] Chaperones such as HSP40 and HSP70 participate in many biological processes in which protein folding is involved. These include protein translocation, protein translation, protein assembly and disassembly, and protein degradation. It is understandable that such genes would be induced considering the evolving processes of a phenotype ‘switch.’ However heat shock protein production has been reported to be induced as a result of harsh changes in their environmental conditions such as stress, ishaemia or hypoxia resulting in protein damage. Therefore it cannot be ruled out that the induction of these genes is in fact a protective measure as a consequence of the adverse conditions in the co-culture.

[0185] HSP60 has been observed in highly replicating cells e.g. short-living epithelial cells of the intestine. Involved in the import and refolding of nuclear-encoded proteins destined for the mitochondrial matrix.

[0186] The 27-kDa heat shock protein (HSP27) is expressed in a variety of tissues, including gut epithelia and in the absence of stress has been reported to regulate actin filament dynamics. Hsp27 induction in the M cell model like the other heat shock proteins (IISPs) may be active in development of resistance to stressful conditions. Activation of HSP27 can contribute to agonist-induced phosphorylation-modulated reorganization of the actin cytoskeleton and, in the case of stress activation, provides an actin-based adaptive response of cells to the new environmental conditions, and is ideal candidate for the plasticity seen in M cells.

[0187] Expression of receptors for fMLP on human phagocyles is well established, but there is conflicting evidence regarding the potential expression of fMLP receptors on other cells within the mucosa, particularly the epithelial cells. The reported observation of the receptor for the chemotactic peptide fMLP supports the notion of the intestinal epithelial cell as an early “sensor” of infection and inflammation. It has been reported that, fMLP, present in abundance in the lumen of the gut and that activation of fMLP receptors induces cytotoxic effects such as lysosomal release and superoxide generation. Thus, it would appear that their presence would be a defensive role in the event of infection of microorganisms.

[0188] Glutaredoxin (thioltransferase) is a small, heat-stable protein catalyzing glutathione-dependent disulfide oxdoreduction reactions in a coupled system with NADPH, GSH and glutathione reductase. It is important in regulating cell metabolism through the inactivation of oxidated transcription factors thought to be important in cellular responses to oxidant stress. This modulation of transcription factors' binding activity has been demonstrated for a number of transcription factors, including NF-kB/Rel proteins, Fos and Jun proteins and nuclear factor I (NFI) family of transcription factors. The induction of such a gene would appear to provide a protective role and is particularly influential on a number of key transcription factors.

[0189] CREB has been implicated as having prominent role in protection. Over-expression of the gene was reported to reverse hypoxia elicited TNF induction. This infers that the increase in the cAMP responsive element binding protein (CREB) mRNA is possibly a protective response to conditions.

[0190] Inactive in cells under normal conditions, gadd153 expression is markedly induced in response to a variety of cellular stresses, including nutrient deprivation, DNA damage, and oxidative stress (e.g. free radicals) which normally leads to growth arrest. The arrest in growth is thought to allow critical repair processes to be carried out before any further cell cycling. It would appear that the gadd153 expression in the co-culture is for reparative purposes.

[0191] The excision repair proteins XPG and XPD have been reported to be involved in nucleotide repair. In addition, mRNA for ubiquitin-conjugating enzyme (likely to be involved in post-replication repair and induced mutagenesis, RAD23, and ataxia telangiectasia are also expressed in the co-culture. Their expression, coinciding with gadd153 suggests there is a high degree of impairment to genes in the M cell model.

[0192] Interleukin-13 (IL-13) is a potent anti-inflammatory cytokine and has been reported to have the same protective properties in inflammation as IL-4 through its ability to modulate and suppress pro-inflammatory cytokines. It is puzzling that in an environment with a high level of pro-inflammatory cytokines produced that IL-13 mRNA is in fact reduced. One possible explanation might be its anti-adhesion effect. It has been reported that IL-13 (secreted from lymhocytes) down regulated cell adhesion molecules in colonic epithelium and so the role of IL-13 in the co-cultured cells is modulating cell adhesion properties and not inflammation.

[0193] In view of the foregoing, in the method of the invention for increasing the level of a protein in a PP cell, which comprises delivering a nucleic acid coding for a protein, the protein may be selected from the group consisting of HSP40, HSP70, HSP60, HSO27, fMLP-related receptor, HSP27, glutaredoxin, CREB, gadd 153, XPG, XPD, ubiquitin, conjugating enzyme, RAD 23, and ataxia telengiectasia.

### Apoptosis and Programmed Cell Death

[0194] In programmed cell death, apoptosis is programmed in the sense that a genetically directed ‘clock’ selects a given time for the death of certain cells. It has been reported that it provides an important mechanism for the maintenance and renewal of cells in the gut and in development. However, for the epithelium to maintain its barrier functions, the level of apoptosis needs to be regulated, and this is ‘checked’ by several signal transduction systems. Toxic insult or lack of factors that maintain cell survival can also lead to apoptotic death of the cell.

[0195] It has been reported that over-expression of c-fos and c-jun (constituents of the AP-1 transcription factor) in the intestine correlates with programmed cell death and subsequent cellular regeneration. Other studies have demonstrated increases in both proximal jejunum and colon jun mRNA level coincide with a period of major changes in intestinal cell proliferation). The c-jun protein product involved in activation of AP-1, transcription is enhanced when it is phosphorylated by stress-activated protein kinases of which there are many in the M cell model.

[0196] As intestinal epithelial cells reach the villus apex they undergo apoptosis and, are shed and, in normal circumstances, caspases, a family of cysteine proteases, play a central role in initiating, amplifying, and executing apoptosis. The pattern of caspase activation in this process is not understood. It is interesting to note that the apoptosis regulator, bcl-x, and caspase 9 are induced in the co-culture. The bcl-x gene plays an important role in the regulation of programmed cell death (PCD), depending on its splice variant the bcl-x protein can accelerate apoptosis or delay/prevent programmed cell death (as previously reported). Bcl-x controls apoptosis mechanisms at points upstream of caspase activation. Perhaps, it is responsible for the marked induction of caspase-9. Caspase-9 is a caspase initiator. Once activated, it can proteolytically activate other caspases (including 3, 6 and 7), which in turn activate caspase-2 and 6 (as previously reported). Inhibitor of apoptosis protein 2 (HIAP2) binds to and inhibits caspase-3. Its expression is a mechanism of regulating cell death depending on the particular cellular or environmental signals. Therefore, its absence in the co-culture cells and the increased activity of caspase-9 allows caspase-3 unchecked pro-apoptotic activity.

[0197] The death domain receptor 3 (DDR3) member of the TNFR family can induce apotosis as previously reported. Its mRNA expression is also reduced in the co-culture model.

[0198] In view of the foregoing, in the method of the invention for increasing the level of a protein in a PP cell, which comprises delivering a nucleic acid coding for a protein, the protein may be selected from the group selected from: bcl-x and capase-9 and more generally in view of the foregoing may be selected from the group consisting of

[0199] cyclin D1, PLC-L, GRB2, ERK3/MAPK6, ERK1, ERK3, JNK2, CD40, CRAF1, C-MYC, PT-α, IL-R, CD40, C-MYC, PKC-α, GSTA1, GATA-2, PLGF, ezrin, HGF activator, hepatocyte growth factor-like protein, NCAD, MNDA, LHX1, TIE-1, NCAML1, CD104, CD44, SRC1, NMDA, TKT, ephrin (type A), Sp1, RAB proteins, PKC, TIR, Jak3, EGR-1, TNK1, CAMK IV, HSP40, HSP70, HSP60, HSO27, fMLP-related receptor, HSP27, glutaredoxin, CREB, gadd153, XPG, XPD, ubiqitin-conjugating enzyme, RAD23, cadherin 2, neural cell adhesion molecule, integrin alpha 3, leukocyte adhesion glycoprotein p150, integrin beta 4, TIE, NCAML1, α3β1 integrin, CD11C antigen, CD104 antigen, CD44, NMDA, TKT, ephrin (type A), and Sp1, a RAB protein, PKC, and TfR, bcl-x and capase-9

### Example 6

### Targeted Gene Delivery

[0200] Delivery of genes, gene fragments, oligonucleotides or other nucleotide fragments or analogues of the present invention to a living organism can be accomplished by methods currently available in the prior art. For example, various recombinant viruses have been used for the oral delivery of genes, such as adenovirus, retrovirus, adeno-associated virus, vaccinia virus, lenti-virus and plant-derived viruses, wherein the viral genome is replaced with an expression vector for the gene of interest. See, David T. Page and Sally Cudmore (2001). Innovations in oral gene delivery: challenges and potentials. Drug Discovery Today, Vol. 6, No. 2, pp 92-101. Viral mimetic particles such as virosomes and various types of polymers and liposomes, such as cationic and fusogenic, are also employed for gene delivery. See, U.S. Pat. Nos. 4,885,172, 5,047,245, 5,171,578, 5,059,421, 5,399,331, 5,204,112, 1,252,263, 5,376,452, 5,552,155, 6,120,797, 6,087,325, 6,143,716. Examples of polymers are PLGA, PLA co-polymers, chitosan, and fumaric acid/sebacic acid co-polymers. For these systems, the polymer or liposome is formed from component parts in a solution of the gene expression vector, thus encapsulating the genes when particles are formed. Cationic lipids such as DOTAP and polyethylenimine are commonly used whereby the gene expression vector is complexed with and protected by the lipids. (See, Ogris M. et al. (2001). DNA/polyethylenimine transfection particles: Influence of ligands, polymer size, and pegylation on internalization and gene expression. AAPS PharmSci, 3 (3), article 21). Agents such as protamine are used to condense DNA, which due to the reduction in size of the DNA particles are more easily taken up by cells. Recombinant live bacteria (e.g. Shigella spp, Salmonella spp.) have also been exploited for gene delivery to the gut. Oral bioavailability enhancers, (e.g. sodium caprate, Elan's PROMDAS technology) could be used to increase uptake of a gene or encapsulated gene formulation.

[0201] In all cases the delivery systems can be targeted with various ligands on the surface of the particles in order to enhance binding to specific cells type and/or to enhance uptake. These ligands could be peptides, proteins, antibodies, peptidomimetics, and lipids that recognize or are being recognized by specific sites/receptors on the cell surface (Maruyama K. (2000). In vivo Targeting by Liposomes. Biol. Pharm. Bull., 23(7), 791-799).

[0202] The targeting ligands may be peptide based, peptidomimetic based, antibody based, single chain antibody based, small organic molecule based. The targeting ligands may also be natural substrates for such receptors, transporters or other cell surface molecules found on the surface of M cells or other cell types found in Peyer's patch. The targeting ligands may be engineered so as to be genetically expressed on the surface of viruses, bacteriophages, virosomes, bacteria or other organisms, which can be utilized for vaccine delivery in the gut. Furthermore the targeting ligands can be presented either as direct conjugates to antigens, or on the surface of drug-loaded particulates such as liposomes, PLGA particles, other particulates and at the same time retain recognition by and interaction with the receptors, transporters or other cell surface molecules found on the surface of M cells and/or other cells of Peyer's patch tissue.

[0203] Examples of peptides that target the gastro-intestinal tract, in particular, membrane translocating peptides useful for vaccine delivery to M cells along with M cell specific targeting ligands are described in Table 4.

[0204] Further, targeting ligands can be genetically engineered into the surface coats of viruses, bacteriophages or bacteria, conjugated directly to antigens conjugated to the lipids in liposomes by covalent methods or streptavidin-biotin linkages, or coated onto the surface of polymers after particle formation (Torchilin V. P. et al. (2001) Proc. Natl. Acad. Sci. USA, Vol. 98, Issue 15, 8786-8791, July 17.

[0205] TAT peptide on the surface of the liposomes affords their efficient delivery even at low temperature and in the presence of metabolic inhibitors; Lestini et al. (2002). Surface modification of liposomes for selective cell targeting in cardiovascular drug delivery. J. Controlled Release, 78, 235247; Dokka S. et al. (1997) Cellular delivery of oligonucleotides by synthetic import peptide carrier. Pharm. Res., vol. 14, No. 12, 1759-1764); Wu Y et al. (2000). Gene transfer facilitated by a cellular targeting molecule, retrovirus protein σ1. Gene Therapy, 7, 61-69).

[0206] When the delivery of the gene to M cells in the gut is designed to prime or boost the immune system, the genes can be co-delivered/co-encapsulated with adjuvants (e.g. MF59, alum, saponin, QS21, MPL, bacterial toxins such as Lt, CT or mutants there-of, CPG motif nucleotides). Immune response could be boosted at a later stage by methods such as subcutaneous administration of an adjuvant.

[0207] In some cases it may be desired to shut off expression of certain genes, so as to enhance the adoption by enterocytes of an M cell phenotype. This can be achieved by the delivery, by methods outlined above, of antisense oligonucleotides, ribozyme, or RNA-interference molecules specific to the gene of interest.

TABLLE 4

Peptides that Target to and/or Enhance Uptake Across the GIT

| | |
|---|---|
| SEQ. ID NO: | PEPTIDE SEQUENCES |

| | |
|---|---|
| SEQ. ID NO: | ADDFMGCMLTLPTSLGGEGSPYNYYDTHEANGPH |
| SEQ. ID NO: | TPTTTATWGTTGPVDLSSLHLLRHPCREF |
| SEQ. ID NO: | MSPDHQYALQSSPVLPCCRPLLVDSDYIHS |
| SEQ. ID NO: | RGYGRLAESCCVNRCIRTVGGCGNSPASDILSAT |
| SEQ. ID NO: | STPGRGSGRDTGANNPADTPYANPSHRDTILSLDPSLL |
| SEQ. ID NO: | RQHLWRDLHGPRFRDTNTGVAGTFSPPVSVADTHRTPD |
| SEQ. ID NO: | SFSNLTAGDEEDDHFSGGRFNHANLTSRSHNRGQLASSA |
| SEQ. ID NO: | RQSVLDSWGGKTSVTGLSERYYASHSHTSAPTPHYASHS |
| SEQ. ID NO: | RQWVGDRDAGEGNTWVDEKYSRDANVISYRSHNHASQGTL |
| SEQ. ID NO: | RASDCDVECNLRWVEDVGGVWYAKTVSRMLSTT |
| SEQ. ID NO: | RQSAGFLGFAPTNIDDTSFNAGCGDTLAIPCRHRSSLISPARPP |
| SEQ. ID NO: | RSGAYESPDGRGGRSYVGGGGGCGNIGRKHNLWGLRTASPACWD |
| SEQ. ID NO: | SPRSFWPWSRHESFGISNYLGCGYRTCISGTMTKSSPIYPRHS |
| SEQ. ID NO: | SSSSDWGGVPGKWRERFKGRGCGISITSVLTGKPNPCPEPKAA |
| SEQ. ID NO: | RVGQCTDSDVRRPWARSCAHQGCGAGTRNSHGCITRPLRQASAH |
| SEQ. ID NO: | SHSGGMNRAYGDVFRELRDRWNATSHHTRPTPQLPRGPN |
| SEQ. ID NO: | SPCGGSWGRFMQGGLFGGRTDGCGAHRNRTSASLEPPSSDY |
| SEQ. ID NO: | RGAADQRRGWSENLGLPRVGWDAIAHNSYTFTSRRPRPP |
| SEQ. ID NO: | SGGEVSSWGRVNDLCARVSWTGCGTARSARTDNKGFLPKHSSLR |
| SEQ. ID NO: | SDSDGDHYGLRGGVRCSLRDRGCGLALSTVHAGPPSFYPKLSSP |
| SEQ. ID NO: | RSLGNYGVTGTVDVTVLPMPGHANHLGVSSASSSDPPRR |
| SEQ. ID NO: | RTTTAKGCLLGSFGVLSGCSFTPTSPPPHLGYPPHSVN |
| SEQ. ID NO: | SPKLSSVGVMTKVTELPTEGPNAISIPISATLGPRNPLR |
| SEQ. ID NO: | RWCGAELCNSVTKKFRPGWRDHANPSTHHRTPPPSQSSP |
| SEQ. ID NO: | RWCGADDPCGASRWRGGNSLFGCGLRCSAAQSTPSGRIHSTSTS |
| SEQ. ID NO: | SKSGEGGDSSRGETGWARVRSHAMTAGRFRWYNQLPSDR |
| SEQ. ID NO: | RSSANNCEWKSDWMRRA.CIARYANSSGPARAVDTKAAP |
| SEQ. ID NO: | SKWSWSSRWGSPQDKVEKTRAGCGGSPSSTNCHPYTFAPPPQAG |
| SEQ. ID NO: | SGFWEFSRGLWDGENRKSVRSGCGFRGSSAQGPCPVTPATIDKH |
| SEQ. ID NO: | SESGRCRSVSRWMTTWQTQKGGCGSNVSRGSPLDPSHQTGHATT |
| SEQ. ID NO: | REWRFAGPPLDLWAGPSLPSFNASSHPRALRTYWSQRPR |
| SEQ. ID NO: | RMEDIKNSGWRDSCRWGDLRPGCGSRQWYPSNMRSSRDYPAGGH |
| SEQ. ID NO: | SHPWYRHWNHGDFSGSGQSRHTPPESPHPGRPNATI |
| SEQ. ID NO: | RYKHDIGCDAGVDKKSSSVRGGCGAHSSPPRAGRGPRGTMVSRL |
| SEQ. ID NO: | SQGSKQCMQYRTGRLTVGSEYGCGMNPARHATPAYPARLLPRYR |
| SEQ. ID NO: | SGRTTSEISGLWGWGDDRSGYGWGNTLRPNYIPYRQATNRHRYT |
| SEQ. ID NO: | RWNWTVLPATGGHYWTRSTDYHAINNHRPSIPHQHPTPI |
| SEQ. ID NO: | SWSSWNWSSKTTRLGDRATREGCGPSQSDGCPYNGRLTTVKPRT |
| SEQ. ID NO: | SGSLNAWQPRSWVGGAFRSHANNNLNPKPTMVTRHPT |
| SEQ. ID NO: | RYSGLSPRDNGPACSQEATLEGCGAQRLMSTRRKGRNSRPGWTL |
| SEQ. ID NO: | SVGNDKTSRPVSFYGRVSDLWNASLMPKRTPSSKRHDDG |
| SEQ. ID NO: | TNAKHSSHNRRLRTR |
| SEQ. ID NO: | SDNAKEPGDYNCCGNGNSTG |
| SEQ. ID NO: | RTRLRRNHSSHKANT |
| SEQ. ID NO: | PEPTIDE SEQUENCES |
| SEQ. ID NO: | GPHRRGRPNSRRSSKT |
| SEQ. ID NO: | GTSNGNGCCNYDGP |
| | Pevers patch and/ or M cell specific targeting ligands: |
| SEQ. ID NO: | ATPPPWLLRTAP |
| SEQ. ID NO: | DGSIHKRNIMPL |
| SEQ. ID NO: | DYDSLSWRSTLH |
| SEQ. ID NO: | GEPTTDMRWRNP |
| SEQ. ID NO: | GLWPWNPVTVLP |
| SEQ. ID NO: | HMLNDPTPPPYW |
| SEQ. ID NO: | KPAYTHEYRWLA |
| SEQ. ID NO: | LETTCASLCYPS |
| SEQ. ID NO: | LGTDWHSVSYTL |
| SEQ. ID NO: | LGTLNAGVPGFP |
| SEQ. ID NO: | LTHSKNPVFLST |
| SEQ. ID NO: | LVPTTHRHWPVT |
| SEQ. ID NO: | LVSNARGFNNLS |
| SEQ. ID NO: | NTRIPEPIRFYM |
| SEQ. ID NO: | NVYTFHSMSPMP |
| SEQ. ID NO: | QHTTLTSHPRQY |
| SEQ. ID NO: | SDFSDTMPHRPS |
| SEQ. ID NO: | SIDTIQILSLRS |
| SEQ. ID NO: | SISWASQPPYSL |
| SEQ. ID NO: | SMVKFPRPLDSR |
| SEQ. ID NO: | SPTLGASVAQTN |
| SEQ. ID NO: | TMSPNVYYTAFG |
| SEQ. ID NO: | TQIPSRPQTPSQ |
| SEQ. ID NO: | VCSNMYFSCRLS |
| SEQ. ID NO: | VPPHPMTYSCQY |
| SEQ. ID NO: | VPRLEATMVPDI |
| SEQ. ID NO: | VPTKPELPVNFT |
| SEQ. ID NO: | WSSDLPQPASTY |
| SEQ. ID NO: | YITPYAHLRGGN |
| SEQ. ID NO: | NVYTDNTLSPTP |
| SEQ. ID NO: | LETTAASLCYPS |
| SEQ. ID NO: | SPYCLSACTTEL |
| SEQ. ID NO: | LETTCASLCYPS |
| SEQ. ID NO: | VPPHPMTYSCQY |
| SEQ. ID NO: | VPPHPMTYSAQY |
| SEQ. ID NO: | VPPHPMTYSSQY |
| SEQ. ID NO: | YQCSYTMPHPPV |
| SEQ. ID NO: | VCSNMYFSCRLS |
| SEQ. ID NO: | VSSNMYFSSRLS |
| SEQ. ID NO: | DYDSLSWRSTLHGGHESSH |
| SEQ. ID NO: | GNPTSTMRW |
| SEQ. ID NO: | PWNSATVL |
| SEQ. ID NO: | NDPTAPPY |
| | Membrane Translocating Peptides: |
| | (underline denotes cyclization) |
| SEQ. ID NO: | KKAAAVLLPVLLAAPFITC-LC |
| SEQ. ID NO: | KKKAAAVLLPVLLAAP |
| SEQ. ID NO: | KKAAAVLLPVLLAAPREDL |
| SEQ. ID NO: | KKCAAVLLPVLLAAPC |
| SEQ. ID NO: | CAAVLLPVLLAAC |
| SEQ. ID NO: | KKCAAVLLPVLLAC |
| SEQ. ID NO: | CAAVLLPVLLC |
| SEQ. ID NO: | CAAVLLPVLC |
| SEQ. ID NO: | CAVLLPVLLAAPC |
| SEQ. ID NO: | CVLLPVLLAAPC |
| SEQ. ID NO: | CLLPVLLAAPC |
| SEQ. ID NO: | CLPVLLAAPC |
| SEQ. ID NO: | AAVLLPVLLAAP |
| SEQ. ID NO: | AAVLLPVLLAA |
| SEQ. ID NO: | KKAAVLLPVLLA |
| SEQ. ID NO: | AAVLLPVLL |
| SEQ. ID NO: | AAVLLPVL |
| SEQ. ID NO: | AVLLPVLLAAP |
| SEQ. ID NO: | VLLPVLLAAP |
| SEQ. ID NO: | LLPVLLAAP |
| SEQ. ID NO: | LPVLLAAP |
| SEQ. ID NO: | AAVLLPVLLAAKKKRKA |
| SEQ. ID NO: | KKKRKAAAAVLLPVLLA |

### Example 7

[0208] Use of Bacterial Coatings to Convert Enterocytes to M Cells

[0209] Might be nice to have some type of claim capturing the concept from this section Use of bacterial coatings on PLGA particles, co-administered bacterial particles or pro-biotic yogurts as adjuvants for oral vaccination with PLGA particles. The invention is based on converting enterocytes to M cells by using specific bacteria in advance of, or along with the oral vaccine particle of interest. In doing so the capability of absorbing particles through M cells will be increased. This idea is not based on targeting but on the ability of live bacteria or active bacterial components to stimulate cytokine production in Peyer's patches, thus, enabling enterocyte-M cell conversion. As a result, an invention disclosed herein is a method of promoting enterocyte-M cell conversion, said method comprising orally administering an antigen, antigenic composition, or antigen-carrying particle to a person and either simultaneously with, or prior to, said administration, also orally administering a bacteria, or pro-biotic yogurts, or bacterial component to said person.

[0210] All references cited herein are incorporated herein by reference in their entireties.

TABLE 5
Miscellaneous GenBank Accession Numbers

| | |
|---|---|
| Human Serum Albumin | NM_000477.3 |
| Calreticulin | M84739 |

### Dates for GenBank Records

[0211] To the extent the date of a GenBank record, ratherthan its version number, is relevant for purposes of incorporation by reference, the date of the record is the filing date of this application with the following exceptions:

TABLE 2 Rat genes

| | |
|---|---|
| Mar. 27, 2002 | D83697 through M10149 |
| Mar. 28, 2002 | Q03238 through NM_017218.2 |

TABLE 3 Human genes with a fold change of 0.5 or less

Apr. 02, 2002

TABLE 2 Human genes with a fold change of 0.5 or less

| | |
|---|---|
| Apr. 02, 2002 | U76376.1 through XM_087242.1 |
| Apr. 03, 2002 | S90469 through M29366.1 |

[0212] The records specified for Mar. 27, 2002, Mar. 28, 2002, Apr. 2, 2002, and Apr. 3, 2002, do not include those of GenBank IDs: Q07912, P21145, P46734, Q92851, Q13490, NP_{—}006168, P28360, P28347, Q06830, P20701, P01589, P05106, P35225, P17936, S18408, P17074, P10661, P35426, P09456, P22791, Q06486, P21708, Q03238, P10644, P54868, P10398, P48730, P31749, P27361, P25063, Q14012, P13866

AMINO ACID SEQUENCES AND NUCLEOTIDE SEQUENCES CORRESPONDING TO SELECTED
CENBANK ID NUMBERS

GENBANK ID: M81750
VERSION M81750.1 GI:895928
MVNEYKKILLLKGFELMDDYHFTSIKSLLAYDLGLTTKMQEEYN
RIRITDLMEKKFQGVACLDKLIELAKDMPSLKNLVNNLRKEKSKVAKKIKIQEKAPVK
KINQEEVGLAAPAPTARNKLTSEARGRIPVAQKRKTPNKEKTEAKRNKVSQEQSKPPG
PSGASTSAAVDHPPLPQTSSSTFSNTSFTPNQETQAQRQVDARRNVPQNDFVTVVVLK
ATAPFKYESPENGKSTNFHATVASKTQYFHVKVPDINLKEKFVRKKVITISDYSECKC
VMEIKEASSVSDFNQNFEVPNRIIEIANKTPKISQLYKQASGTMVYGLFMLQKKSVHK
KNTIYEIQDNTGSMDVVGSGKWENIKCEKGDKLRLFCLQLRTVDRKLKLVCGSHSFIK
VIKAKKNKEGPMNVN
GENBANK ID: X59798
VERSION X59798.1 GI:35631
MEHQLLCCEVETIRRAYPDANLLNDRVLRAMLKAEETCAPSVSY
FKCVQKEVLPSMRKIVATWMLEVCEEQKCEEEVFPLAMNYLDRFLSLEPVKKSRLQLL
GATCMFVASKMKETIPLTAEKLCIYTDNSIRPEELLQMELLLVNKLKMNLAAMTPHDF
IEHFLSKMPEAEENKQIIRKHAQTFVALCATDVKFISNPPSMVAAGSVVAAVQGLNLR
SPNNFLSYYRLTRFLSRVIKCDPDCLRACQEQIEALLESSLRQAQQNMDPKAAEEEEE
EEEEVDLACTPTDVRDVDI
GENBANK ID: L27211.1
VERSION L27211.1 GI:558656
MEPAAGSSMEPSADMLATAAARGRVEEVRALLEAGALPNAPNSY
GRRPIQVMMMGSARVAELLLLHGAEPNCADFATLTRPVNDAAREGFLDTLVVLHRAGA
RLDVRDAWGRLPVDLAEELGHRDVARYLRAAAGGTRGSNHARIDAAEGPSDIPD
GENBANK ID: U22398
VERSION U22398.1 GI:790247
MSDASLRSTSTMERLVARGTFPVLVRTSACRSLFGPVDNEELSR
ELQARLAELNAEDQNRWDYDFQQDMPLRGPGRLQWTEVDSDSVPAFYRETVQVGRCRL
LLAPRPVAVAVAVSPPLEPAAESLDGLEEAPEQLPSVPVPAPASTPPPVPVLAPAPAP
APAPVAAPVAAPVAVAVLAPAPAPAPAPAPAPAPVAAPAPAPAPAPAPAPAPAPAPDA
APQESAEQGANQGQRGQEPLADQLESGISGRPAAGTAAASANGAAIKKLSGPLISDFF
AKRKRSAPEKSSGDVPAPCPSPSAAPGVGSVEQTPRKRLR
GENBANK ID: X51521
VERSION X51521.1 GI:31282
MPKPINVRVTTMDAELEFAIQPNTTGKQLFDQVVKTIGLREVWY
FGLNYVDNKGFPTMLKLDKKVSAQEVRKENPLQFKFRAKFYPEDVAEELIQDITQKLF
FLQVKEGILSDEIYCPPETAVLLGSYAVQAKFGDYNKEVEKSGYLSSERLIPQRVMDQ
HKLTRDQWEDRIQVWHAERRGMLKDNAMLEYLKIAQDLEMYGINYFEIKNKKGTDLWL
GVDALGLNIYEKDDKLTPKIGFPWSEIRNISFNDKKFVIKPIDKKAPDFVFYAPRLRI
NKRILQLCMGNHELYMRRRKPDTIEVQQMKAQAREEKHQKQLERQQLETEKKRRETVE
REKEQMMREKEELMLRLQDYEEKTKKAERELSEQIQRALQLEEERKRAQEEAERLEAD
RMAALRAKEELERQAVDQIKSQEQLAAELAEYTAKIALLEEARRRKEDEVEEMQHRAK
EAQDDLVKTKEELHLVMTAPPPPPPPVYEPVSYHVQESLQDEGAEPTGYSAELSSEGI
RDDRNEEKRITEAEKNERVQRQLVTLSSELSQARDENKRTRNDIIHNENMRQGRDKYK
TLRQIRQGNTKQRIDEFEAL
GENBANK ID: L04143.1
VERSION L04143.1 GI:180574
THIS ENTRY IS NOT CONTIGUOUS CENOMIC DNA. IT CONTAINS NUMEROUS PIECES OF
INTRONS.

| | |
|---|---|
| 1 | GAGCTCGGAT CCCATCGCAG CTACCGCGAT GAGAGGCGCT CGCGGCGCCT GGGATTTTCT |
| 61 | CTGCGTTCTG CTCCTACTGC TTCGCGTCCA CACAGGTGGG ACACCGCGGC TGGCTCCCCC |
| 121 | ACCGTGCCAC TACTCGCGAA CCCTGTGCCC TGGGAGGGTG CTACCGCCAT GGCATCCGCA |
| 181 | GACAGGACTG CGGGCCCTCA GTGGGCCTGC GTTCCAGCCT CCGGGGAGAC TCCAGGTGGC |
| 241 | CCTCGGACTC TCCGGCGCCC TGCCTCGCTC ACCTGCGCGA GGAGACCCCA GCTGCTGGTG |
| 301 | GTGGGGGACG CGAATCCGGG GTTCTTCGGG AATGGGGACA GCAAGAGGGG GTTAGGCGTG |
| 361 | AGCGAGGCTG CAGGCTCCGT GCGAGTTTGG GGTGGCTTTT GTGCCGACGT TGCGCGGGGG |
| 421 | CGGAGGCGGG GGCTCAGGGT TTGCACCGAG CGCCTTCTCT CTCGGTGCGA GGCCGGCCGC |
| 481 | AGCTTCCTTT TGTTAAAAGT TGCGTGTGTG TGACGGCGCC CGGGCTGCAG CCTCAACCTC |
| 541 | CTGGGCTTAA GTGATCTCCC ACCTCAGCCT CCCGCCTCAG CCTCCCATGT AGCTGGGAAA |
| 601 | ACAGGTTCCC ACTACCATGC CCAGCTAATG TTTTTTCTAG TTTTTGTAGA TGTGTTGGGC |
| 661 | GGTGGGGGCG TCTCACTGCG TTGCCCAGGC TGGTCTCGAA CTCCTAGGCT CAAGCAATCT |
| 721 | TCCCACCTCA GCCTCCCAGA GTGCTGGGAT TACAGGCGTG ACGACGGCAC CTGGCCAGCA |
| 781 | GTTTGTTCTT TAAACCCTGA AATGTATGTG AGGACCATGT GTCACACTAG CATGGACGTT |
| 841 | TTCCCAGCAT CTAGCATGGT GCTTTGTAGA TGATAATTAA TGAATAGGTA TTTGAATACA |
| 901 | TGGAGGCATG CATGGCTGAA TGAAGTGGCT GTTGTAAAAT TTCTAGGGTT CAGGTTTCAT |
| 961 | ATTCAGAGCC TAAAGTTTGC ATCTTATAAA CTAAATAGTT TCCTATCTAG GAAACCTATT |
| 1021 | TAGGCATTAG GGTGTTAAAA CAGGTGTATC ATTTTCTGCC TTAGTGTTTA GAGATTTGTG |
| 1081 | AATAGTTCTC CTTTTGATGA ACATTGCCAT GTAAAGAGAG TTATACAGAA ATAACTGAAT |
| 1141 | TCACACAGTT TTAAGGAAAA GCTATTCTAT GTCATGGTCA TGTATATTCT GCCAAAGAGA |
| 1201 | GTGACAGGCC AGTAGTTTCT TTTTTCTTTT TCCCCATAGT GTGAGATTTT GTTTCTGTTG |
| 1261 | TTTCTAAGCT GGGTGTCTGC ATGTCCACAC TGCGAAGATG GCCCATATCA GAATGAAAAC |
| 1321 | TTGACCCAAT TGTATGTTTA GCCCAGAGAA GGCTGGGGCA TTCAGCACAT CCTGGCTTGG |
| 1381 | GGACCAAATG TGACCCTCAG GATTAATTGA GGGTTGGAGA AAATAATTTT ATAGATGAAC |
| 1441 | TTAAGACATT TTAGACAGAA CTCTCTTTTC AGCCATAAAT AGCAGGGCAG CTTTGTCCTA |
| 1501 | TTTTTATTGT AGAGTACACA GAAGATGGAA CTCAGTATTG GAAGAAGTGC TTTATTTCGC |
| 1561 | CAAGGAAGAA GATCATACTC AACACGATTC TGTTTTTCTT GGCAGGCTCT TCTCAACCAT |
| 1621 | CTGTGAGTCC AGGGGAACCG TCTCCACCAT CCATCCATCC AGGAAAATCA GACTTAATAG |
| 1681 | TCCGCGTGGG CGACGAGATT AGGCTGTTAT GCACTGATCC GGGCTTTGTC AAATGGACTT |
| 1741 | TTGAGATCCT GGATGAAACG AATGAGAATA AGCAGAATGA ATGGATCACG GAAAAGGCAG |
| 1801 | AAGCCACCAA CACCGGCAAA TACACGTGCA CCAACAAACA CGGCTTAAGC AATTCCATTT |
| 1861 | ATGTGTTTGT TAGAGGTAAA TGCTTGGCTT TCTGCAGCAG GTCATGTCAC TTTAGGAGGG |
| 1921 | TTGCTTTTAT GACACCGCAG TTTCATCTAT GAAATGGCAA TAATGATAGT ACTGATCATG |
| 1981 | GGAGGGGCAA TTTGAAGATT AAATGAGATT AAGTGTAATG GTCCAAGCTT AGTGCGTGAT |
| 2041 | ACATGGAAAG CGTTTAATAA ATGTTAATTC TCAATAGTAC TAGATGGATA AATTTTGCTT |
| 2101 | TTGTTTACAC AGAAAAAAGC AGCCATTTGG GCCACTAGTC ATGAAAGGCA ACATATTAGA |
| 2161 | TCTTTAAAAG TGTTTCAGTG TCTGTGACCA GCCATTCCAA CTACTGATTT GGATATGCTT |
| 2221 | CTTATAGATC CTGCCAAGCT TTTCCTTGTT GACCGCTCCT TGTATGGGAA AGAAGACAAC |
| 2281 | GACACGCTGG TCCGCTGTCC TCTCACAGAC CCAGAAGTGA CCAATTATTC CCTCAAGGGG |
| 2341 | TGCCAGGGGA AGCCTCTTCC CAAGGACTTG AGGTTTATTC CTGACCCCAA GGCGGGCATC |
| 2401 | ATGATCAAAA GTGTGAAACG CGCCTACCAT CGGCTCTGTC TGCATTGTTC TGTGGACCAG |
| 2481 | GAGGGCAAGT CAGTGCTGTC GGAAAAATTC ATCCTGAAAG TGAGGCCAGG TACCTTGCTT |
| 2521 | TCTTATCTGC CTCTGGAGTT GAGAACTCAC TTATCTAAAG AGACTTCTCT TCTCGTTGAT |
| 2581 | CGTAAGCTGT ACACATTTGA GGAGAAATGG TAAATCAAAA TTTCATGCTA TAATACAAAT |
| 2641 | TATTTGAGGG GCCACATTTC TTTTCATTCT AGCCTTCAAA GCTGTGCCTG TTGTGTCTGT |
| 2701 | GTCCAAAGCA AGCTATCTTC TTAGGGAAGG GGAAGAATTC ACAGTGACGT GCACAATAAA |
| 2761 | AGATGTGTCT AGTTCTGTGT ACTCAACGTG GAAAAGAGAA AACAGTCAGG TGAGTGAATC |
| 2821 | GCTTCATTCT TCTCATGTTC TGTCTCTGTG GGAGATGATA AGTTTTCTCT TTCAGAAGAG |
| 2881 | TCTGTCCTGA AACTGCCTCG ACTAGTGCGT CTGTCAGAGG AGAAGTTAAT TGCTGCTATT |
| 2941 | TTTAATTTAT CTAGGAAAGA TTCTGAATAT AAATTATATG GTAATCTTCA TTTTTTTTTC |
| 3001 | TCCTTTTCTG AAACCAGCAG ACTAAACTAC AGGAGAAATA TAATAGCTGG CATCACGGTG |
| 3061 | ACTTCAATTA TGAACGTCAG GCAACGTTGA CTATCAGTTC AGCGAGAGTT AATGATTCTG |
| 3121 | GAGTGTTCAT GTGTTATGCC AATAATACTT TTGGATCAGC AAATGTCACA ACAACCTTGG |
| 3181 | AAGTAGTAGG TAAATACCTC TATGGGAATG TTTAAATTAC TGGCAGTAGT GAAAGAAGAA |
| 3241 | ATTATTAGAC AGTTTCTTTT TTATGTAAAT GGAATGTTGA ACAGATTCTT AGAATTTTGT |
| 3301 | TATCACTGAA TGAATGAAAA TTATCCTTGT AGCCTCTTGC AATGAAAGCA CAATTCTGTT |
| 3361 | TTTTTTGTCC AGTAGTTGTA GATAATGTTT CTTTCTGTCT TATTTCATTC TAATTAGATA |
| 3421 | AAGGATTCAT TAATATCTTC CCCATGATAA ACACTACAGT ATTTGTAAAC GATGGAGAAA |
| 3481 | ATGTAGATTT GATTGTTGAA TATGAAGCAT TCCCCAAACC TGAACACCAG CAGTGGATCT |
| 3541 | CTCTGAACAG AACCTTCACT GATAAATGGG AAGATTATCC CAAGTCTGAG AATGAAAGTA |
| 3601 | ATATCAGGTA AGAAATGGAC CTTGCCCTGG GGATTACACA TTACCCCCTT TTCCAGTGGG |
| 3661 | CTTATCAGAT CTTATTTCTG TAACCCGTAA ATCCACGAGA AGATACCTGG TAAAGAAGAA |
| 3721 | AGTCTATTTT GCTAATACTT TACTGAATTA AATGAGTTAT ATTTTTCCTC AAACAGGCAT |
| 3781 | AGATTTCCAG GTAGAAACTG AAAAAGACAT GCCTTCCAAG GCATGCTATC CACAGGTGAT |
| 3841 | TGACTAGTTG TCTTTTCTTT GTAGATACGT AAGTGAACTT CATCTAACGA GATTAAAAGG |
| 3901 | CACCCAAGGA CCCACTTACA CATTCCTAGT GTCCAATTCT GACGTCAATG CTGCCATAGC |
| 3961 | ATTTAATGTT TATGTGAATA GTAACTAACA TGAAGGGCTC TTTTAATTTT TTATTCTTTT |
| 4021 | AAGTTGTGGC TCGTGTTTGT AACAGCTGCA AGGACTCAAC TTGCTGTACT AAAGGTTGTA |
| 4081 | CGGATTTAGA GAGGGAGTGA AGTGAATGTT GCTGACGTTT TCCAGCACTC TGACATATGC |
| 4141 | CCATTTCTGT TTTCCTGTAG CAAAACCAGA AATCCTGACT TACGACAGGC TCGTGAATCC |
| 4201 | CATGCTCCAA TGTGTGGCAC CAGGATTCCC AGAGGCCACA ATAGATTGGT ATTTTTGTCC |
| 4261 | AGGAACTGAG CAGAGGTGAG ATGATTATTT TTGGCACTGC TTATAATGCA GAGGGGAAGG |
| 4321 | ACTGCAATTC ACTTGAATTT CAAATATGTT TTCTGATTTT TTTTAAAAAA GCTTTAACTT |
| 4381 | TGTTTTAAAA GTATGCCACA TCCCAAGTGT TTTATGTATT TATTTATTTT CCTAGAGTAA |
| 4441 | GCCAGGGCTT TTGTTTTCTT CCCTTTAGAT GCTCTGCTTC TGTACTGCCA GTGGATGTGC |
| 4501 | AGACACTAAA CTCATCTGGG CCACCGTTTG GAAAGCTAGT GGTTCAGAGT TCTATAGATT |
| 4561 | CTAGTGCATT CAAGCACAAT CGCACGGTTG AATGTAAGGC TTACAACGAT GTGGGCAAGA |
| 4621 | CTTCTGCCTA TTTTAACTTT GCATTTAAAG GTAACAACAA AGGTATATTT CTTTTTAATC |
| 4681 | CAATTTAAGG GGATGTTTAG GCTCTGTCTA CCATATCAGT CATGATTTTG AGCTCAATTA |
| 4741 | ACCCTCACTA AAGGGAGTCG ACTCGATCCC ATCCTGCCAA AGTTTGTGAT TCCACATTTC |
| 4801 | TCTTCCATTG TAGAGCAAAT CCATCCCCAC ACCCTGTTCA CTCCTTTGCT GATTGGTTTC |
| 4861 | GTAATCGTAG CTGGCATGAT GTGCATTATT GTGATGATTC TGACCTACAA ATATTTACAG |
| 4921 | GTAACCATTT ATTTGTTCTC TCTCCAGAGT GCTCTAATGA CTGAGACAAT AATTATTAAA |
| 4981 | AGGTGATCTA TTTTTCCCTT TCTCCCCACA GAAACCCATG ATGAAGTACA GTGGAAGGTT |
| 5041 | GTTGAGGAGA TAAATGGAAA CAATTATGTT TACATAGACC CAACACAACT TCCTTATGAT |
| 5101 | CACAAATGGG AGTTTCCCAG AAACAGGCTG AGTTTTGGTC AGTATGAAAC AGGGGCTTTC |
| 5161 | CATGTCACCT TTTTGGGTAC ACATAACAGT GACTTTAAGG AACTCCAGTG GCTTCCTTTG |
| 5221 | TTTTGTTCCA CCTGAAACAA TGAGTTTTCT GTGAAATTGC GCCCCTTTTG ATAGGTTTGC |
| 5281 | CATAGAGAAC ATCGTAGGAA AATGTCTCTG GACAACATTG TTTTTAATTC CTTTATTGAT |
| 5341 | TTTGAAACTG CACAAATGGT CCTTCAATTC CACCACCAGC ACCATCACCA CTTACCTTGT |
| 5401 | TGTCTTCCTT CCTACAGGGA AAACCCTGGG TGCTGGAGCT TTCGGGAAGG TTGTTGAGGC |
| 5461 | AACTGCTTAT GGCTTAATTA AGTCAGATGC GGCCATGACT GTCGCTGTAA AGATGCTCAA |
| 5521 | GCGTAAGTTC CTGTATGGTA CTGCATGCGC TTGACATCAG TTTGCCAGTT GTGCTTTTTG |
| 5581 | CTAAAATGCA TGTTTCCAAT TTTAGCGAGT GCCCATTTGA CAGAACGGGA AGCCCTCATG |
| 5641 | TCTGAACTCA AAGTCCTGAG TTACCTTGGT AATCACATGA ATATTGTGAA TCTACTTGGA |
| 5701 | GCCTGCACCA TTGGAGGTAA AGCCGTGTCC AAGCTGCCTT TTATTGTCTG TCAGGTTATC |
| 5761 | AAAACATGAC ATTTTAATAT GATTTTGGCA ATGCTAGATT ATAAACTGCT TGGAACATTT |
| 5821 | TTTTACCCAG ACTGTTGTTC TCTCTTGCTA GATTTTGTTT TCCTCATTGT TCTTAAGAAT |
| 5881 | ATATGGGATT GTATTGGGAC TAAGTAGTCT GATCCACTGA AGCTGAATAT TAATGGCCAT |
| 5941 | GACCACCCTT GGGTATTTTT ATGGGAGGCA GAATTAATCT ATATATCTCA CCTTCTTTCT |
| 6001 | AACCTTTTCT TATGTGCTTT TACCGCCGAC CCTGGTCATT ACAGAATATT GTTGCTATGG |
| 6061 | TGATCTTTTG AATTTTTTGA GAAGAAAACG TGATTCATTT ATTTGTTCAA AGCAGGAAGA |
| 6121 | TCATGCAGAA GCTGCACTTT ATAAGAATCT TCTGCATTCA AAGGAGTCTT CCTGGTAAGA |
| 6181 | CTGATTTACA TAAATAGTTA GCTGTTGACA GGCAGTTCAT GGGGAACTCT TTATTCAAAC |
| 6241 | TTTACATGAC TTTCCTCAAA TTGGTCCAGT CTATTATGTA GCAAAGGGGA TGAGGAGGTA |
| 6301 | GAGCATGACC CATGAGTGCC CTTCTACATG TCCCACTTGA TTCAGTCATG ACTTGTTTCA |
| 6361 | TCTCTCCCAG CAGCGATAGT ACTAATGAGT ACATGGACAT GAAACCTGGA GTTTCTTATG |
| 6421 | TTGTCCCAAC CAAGGCCGAC AAAAGGAGAT CTGTGAGAAT AGGTCAGTAC CTACCTATCA |
| 6481 | AGCAACCAAG AGTAACTTTA CAGAGAGTAT GTATATCATG CTAATGTGGA ATATAACATC |
| 6541 | ATTCCAGTAG CAATGATGCA GACCAGTTCT GCTTTATGGT AGCAGTGCCA ATGGTCAATG |
| 6601 | GCAGTTAGGG GCAAGTTCAC ATTAGTTCAT TGATTACCAG CCTTTGGTAT GTCATTGCCA |
| 6661 | CTGTCTTTTC CTTTCCTGAC CTTTATGGTT GTAATTGCTA AGAAAAATCC TCTCTTCCTC |
| 6721 | ACAGGCTCAT ACATAGAAAG AGATGTGACT CCCGCCATCA TGGAGGATGA CGAGTTGGCC |
| 6781 | CTAGACTTAG AAGACTTGCT GAGCTTTTCT TACCAGGTGG CAAAGGGCAT GGCTTTCCTC |
| 6841 | GCCTCCAAGA ATGTAAGTGG GAGTGATTCT CTAAAGAGTT TTGTGTTTTG TTTTTTTGAT |
| 6901 | TTTTTTTTTT TTTTTTTTTT TTTTGAGAAC AGAGCATTTT AGAGCCATAG TTAAAAGCAG |
| 6961 | AATGTCATTT AAAACAAAAG TATTGGATTT TTTATAATAT AAGCAACACT ATAGTATTAA |
| 7021 | AAAGTTAGTT TTCACTCTTT ACAAGTTAAA ATGAATTTAA ATGGTTTTCT TTTCTCCTCC |
| 7081 | AACCTAATAG TGTATTCACA GAGACTTGGC AGCCAGAAAT ATCCTCCTTA CTCATGGTCG |
| 7141 | GATCACAAAG ATTTGTGATT TTGGTCTAGC CAGAGACATC AAGAATGATT CTAATTATGT |
| 7201 | GGTTAAAGGA AACGTGAGTA CCCATTCTCT GCTTGACAGT CCTGCAAAGG ATTTTTAGTT |
| 7261 | TCAACTTTCG ATAAAAATTG TTTCCGTGAC TTTCATAATG TAAATCCTGT CTAGGGATAT |
| 7321 | CACACATTTT AGCAGTCAAA TGTATTTCAG AGGTGATTGG GATCATCTGA GTTCATATAG |
| 7381 | GTAAAAGGTT TTTGTGAGAT GGTACTCAAG TTATCACTCC ACATTTCAGC AACAGCAGCA |
| 7441 | TCTATAAGAA TATCTTCTGT TCAATTTTGT TGAGCTTCTG AATTAACATT ATTGACTCTG |
| 7501 | TTGTGCTTCT ATTACAGGCT CGACTACCTG TGAAGTGGAT GGCACCTGAA AGCATTTTCA |
| 7561 | ACGTGTATAC ACGTTTGAAA GTGACGTCTG GTCCTATCGG ATTTTTCTTT GGGAGCTGTT |
| 7621 | CTCTTTAGGT AAAATGATCC TTGCCAAAAG ACAACTTCAT TAGACTCAGA GCATCTTGAA |
| 7681 | GTTTCATTGG TGTCCTGCTT CCTTGTGATT AACACTGCTT TGCAAACTGT GTCTCAGGAA |
| 7741 | GCAGCCCCTA TCCTGGAATG CCGGTCGATT CTAAGTTCTA CAAGATGATC AAGGAAGGCT |
| 7801 | TCCGGATGCT CAGCCTGAAC ACGCACCTGC TGAAATGTAA GAGCCAAAAA ATTTTTCCTT |
| 7861 | TAGGTCACGT TTTCCCTTTT ATTTTTCTTT TTAGAGACAG AAACCCAGAT GTTGAGGGTT |
| 7921 | TTCATAACAC AGTTTGAAAT GTCACTTCCA TTCTTTATGA CACACTGGTC AAATGTCATT |
| 7981 | TCTCTAGTTT ATTTTCATAA TCTCTTGTCA CCAAAAATAC AGAAAGTTTC AGTAATATTT |
| 8041 | CATACATGCA GTGTTTTATG TTATCTATAT GTCAGTCCAT ATGTCCAGTT GCATAGCCCT |
| 8101 | CGAATTATTA CTGAAGTTGC TGGATGCCCA TACATTTGAA AACAACCTCA GGGCATTGAC |
| 8161 | GAGGGATAGT AAATGGCCCT TGTCTTGCAG GTATCACATA ATGAAGACTT GCTGGGATGC |
| 8221 | AGATCCCCTA AAAAGACCAA CATTCAAGCA AATTGTTCAG CTAATTGAGA AGCAGATTTC |
| 8281 | AGAGACCACC AATCATGTGA GTATACCCTG CCCAGCCATA GAATCCCCCT TCTCCCAGTT |
| 8341 | CCAGGTGTGT CCTCCTCCTC AGGCTTTCAG GGTGAGGACT AACCTCCCAA CCCCTTCTCT |
| 8401 | CCTAATCTTA GGTTGCAAAT TGGGCTTCAC GTAGGGGAAG TAAAGCAATG GAAACTAGTT |
| 8461 | CTTTTAAGAG TTCCATCAGT TAGTTGTGAT CTTGACACTG TAAGTATGCC TTTTGTTGCT |
| 8521 | ATGTTCGTTG TAGGGACTGC TGTATTCACT ATGGGCTTGT TTTCTCCACA TTTACTCCAA |
| 8581 | CTTAGCAAAC TGCAGCCCCA ACCGACACAA GCCCGTGGTA GACCATTCTG TGCGGATCAA |
| 8641 | TTCTGTCGGC AGCACCGCTT CCTCCTCCCA GCCTCTGCTT GTGCACGACG ATGTCTGAGC |
| 8701 | ACAATCAGTG TTTGGGTCAC CCCTCCAGGA ATCATCTCTT CTTTTGGCTT CCATGATGGT |
| 8761 | TATTTTCTTT TCTTTCAACT TGCATCCAAC TCCAGGATAG TGGGCACCCC ACTGCAATCC |
| 8821 | TGTCTTTCTG AGCACACTTT AGTGGCCGAT GATTTTTGTC ATCAGCCACC ATCCTATTGC |
| 8881 | AAAGCTTCCA ACTGTATATA TTCCCAATAG CAACGTAGCT TCTACCATCA ACAGAAAACA |
| 8941 | TTCTGATTTG GAAAAAGAGA GGCAGGTATG GACTGGGGGC CAGAGTCCTT TCCAAGGCTT |
| 9001 | CTCCAATTCT GCCCAAAAAT ATGGTTGATA GTTTACCTGA ATAAATGGTA GTAATCACAG |
| 9061 | TTGGCCTTCA GAACCATCCA TAGTAGTATG ATGATACAAG ATTAGAAGCT GAAAACCTAA |
| 9121 | GTCCTTTATG TGGAAAACAG AACATCATTA GAACAAAGGA CAGAGTATGA ACACCTGGGC |
| 9181 | TTAAGAAATC TAGTATTTCA TGCTGGGAAT CAGACATAGG CCATGAAAAA AATGATCCCC |
| 9241 | AAGTCTGAAC AAAAGATCCT CTTCTGTCGA CCACTGCATG AGCTTTTATA CTACCGACCT |
| 9301 | GGTPTTTAAA TAGACTTTGC TATTAGAGCA TTGAATTGGA GAGAAGGCCT CCCTAGCCAG |
| 9361 | CACTTGTATA TACGCATGTA TAAATTGTCC GTGTTCATAC ATTTGAGGGG AAAACACCAT |
| 9421 | AAGGTTTCGT TTCTGTATAC AACCCTGGCA TTATGTCCAC TGTGTATAGA AGTAGATTAA |
| 9481 | GAGCCATATA AGTTTGAAGG AAACACTTAA TACCATTTTT TAAGGAAACA ATATAACCAC |
| 9541 | AAAGCACAGT TTGAACAAAA TCTCCTCTTT TAGCTGATGA ACTTATTCTG TAGATTCTCT |
| 9601 | GGAACAAGCC TATCAGCTTC AGAATGGCAT TGTACTCAAT GGATTTGATG CTGTTTGACA |
| 9661 | AAGTTACTGA TTCACTGCAT GGCTCCCACA GGAGTGGGAA AACACTGCCA TCTTAGTTTG |
| 9721 | GATTCTTATG TAGCAGGAAA TAAAGTATAG GTTTAGCCTC CTTCGCAGGC ATGTCCTGGA |
| 9781 | CACCGGGCCA CTATCTATAT ATGTGTATGT ACGTTTGTAT GTGTGTAGAC AAATATTTGG |
| 9841 | AGGGGTATTT TTGCCCTGAG TCCAAGAGGG TCCTTTAGTA CCTGAAAAGT AACTTGGCTT |
| 9901 | TCATTATTAG TACTGCTCTT GTTTCTTTTC ACATAGCTGT CTAGAGTAGC TTACCAGAAG |
| 9961 | CTTCCATAGT GGTGCAGAGG AAGTGGAAGG CATCAGTCCC TATGTATTTG CAGTTCACCT |
| 10021 | GCACTTAAGG CACTCTGTTA TTTAGACTCA TCTTACTGTA CCTGTTCCTT AGACCTTCCA |
| 10081 | TAATGCTACT GTCTCACTGA AACATTTAAA TTTTACCCTT TAGACTGTAG CCTGGATATT |
| 10141 | ATTCTTGTAG TTTACCTCTT TAAAAACAAA ACAAAACAAA ACAAAAAACT CCCCTTCCTC |
| 10201 | ACTGCCCAAT ATAAAAGGCA AATGTGTACA TGGCAGAGTT TGTGTGTTGT CTTGAAAGAT |
| 10261 | TCAGGTATGT TGCCTTTATG GTTTCCCCCT TCTACATTTC TTAGACTACA TTTAGAGAAC |
| 10321 | TGTGGCCGTT ATCTGGAAGT AACCATTTGC ACTGGAGTTC TATGCTCTCG CACCTTTCCA |
| 10381 | AAGTTAACAG ATTTTGGGGT TGTGTTGTCA CCCAAGAGAT TGTTGTTTGC CATACTTTGT |
| 10441 | CTGAAAAATT CCTTTGTGTT TCTATTGACT TCAATGATAG TAAGAAAAGT GGTTGTTAGT |
| 10501 | TATAGATGTC TAGGTACTTC AGGGGCACTT CATTGAGAGT TTTGTCTTGC CATACTTTGT |
| 10561 | CTGAAAAATT CCTTTGTGTT TCTATTGACT TCAATGATAG TAAGAAAAGT GGTTGTTAGT |
| 10621 | TATAGATGTC TAGGTACTTC AGGGGCACTT CATTGAGAGT TTTGTCTTGG ATATTCTTGA |
| 10681 | AAGTTTATAT TTTTATAATT TTTTCTTACA TCAGATGTTT CTTTGCAGTG GCTTAATGTT |
| 10741 | TGAAATTATT TTGTGGCTTT TTTTGTAAAT ATTGAAATGT AGCAATAATC TCTTTTGAAT |
| 10801 | ATTCCCAAGC CCATGAGTCC TTGAAAATAT TTTTTATATA TACAGTAACT TTATGTGTAA |
| 10861 | ATACATAAGC GGCGTAAGTT TAAAGGATGT TGGTGTTCCA CGTGTTTTAT TCCTGTATGT |
| 10921 | TGTCCAATTG TTGACAGTTC TGAAGAATTC TAATAAAATG TACATATATA AATCAA |

GENBANK ID: M32110
VERSION M32110.1 GI:189421
RATPPSPISACHSTMGRKLDPTKEKRGPGRKARKQKGAETELVR
FLPAVSDENSKRLSSRARKRAAKRRLGSVEAPKTNKSPEAKPSPGKLPKGISAGAVQT
AGKKGPQSLFNAPRGKKRPAPGSDEEEEEEDSEEDGNVNHGDLWGSEDDADTVDDYGA
DSNSEDEEEGEALLPIEPAARKQKAREAAAGIQWSEEETEDEBEEKEVTPESGPPKVE
EADGGLQINVDEEPFVLPPAGEMEQDAQAPDLQRVHKRIQDIVGILRDPGAQREEGRS
RSEYLNRLKKQLAIYYSYGDFLLGKLMQLFPLSELVEFLBANEVPRPVTLRTNTLKTR
RRDLAQALINRGVNLDPLGKBSKTGLVVYDSSVPTGATPEYLAGHYMLQGASSMLPVM
ALAPQEHERILDMCCAFGGKTSYMAQLMKNTGVILANDANAERLKSVVGNLHRLGVTN
TIISHYDGRQFPKVVGGFDRVLLDAPCSGTGVISKDPAVKTNKDEKDILRCAHLQKEL
LLSAIDSVNATSKTGGYLVYCTCSITVEENEWVVDYALKKRNVRLVPTGLDFGQEGFT
RFRERRFHPSLRSTRRFYPHTHNMQGFFIAKFKKFSNSIPQSQTGNSETATPTNVDLP
QVIPKSENSSQPAKKAKGAGKTKQQLQKQQHPKKASFQKLNGISKGAQSELSTVPSVT
KTQASSSFQDSSQPAGKAEGIREPKVTGKLKQRSPKLQSSKKVAFLRQNAPPKGTDTQ
TPAVLSPSKTQATLKPKDHHQPLGRAKCVEKQQFAEQPFEKAAFQKQNDTPKGLSLPL
CLPSVPAAPHQQRGRNLSPGATASCCYLRWLKTRRVAHCHCHQVGTLASVRMPSLLCI
PMKFNTHFKTSGH
GenHank ID: J04111
VERSION J04111.1 GI:186624
MTAKMETTFYDDALNASFLPSESGPYGYSNPKTLKQSNTLNLAD
PVGSLKPHLRAKNSDLLTSPDVGLLKLASPELERLIIQSSNGHITTTPTPTQFLCPKN
VTDEQEGFAEGFVRALAELHSGNTLPSVTSAAQPVNGAGMVAPAVASVAGGSGSGGFS
ASLHSEPPVYANLSNFNFGALSSGGGAPSYGAAGLAFPAQPQQQQQPPHHLPQQNPVQ
HPRLQALKEEPQTVPEMPGETPPLSPIDMESQERIKAERKRNRNRIAASKCRKRKLER
IARLEEKVKTLKAQNSELASTANNLREQVAQLKQKVMNHVNSGCQLMLTQQLQTF
GENBANK ID: X59932
VERSION X59932.1 GI:30255
MSAIQAAWPSGTECIAKYNFHGTAEQDLPFCKGDVLTIVAVTKD
PNWYKAKNKVGREGIIPANYVQKREGVKAGTKLSLMPWFHGKITREQAERLLYPPETG
LFLVRESTNYFGDYTLCVSCDGKVEHYRIMYHASKLSIDEEVYFENLMQLVEHYTSDA
DGLCTRLIKPKVMEGTVAAQDEFYRSGWALNMKELKLLQTIGKGEFGDVMLGDYRGNK
VAVKCIKNDATAQAFLAEASVMTQLRHSNLVQLLGVIVEEKGGLYIVTEYMAKGSLVD
YLRSRGRSVLGGDCLLKFSLDVCEAMEYLEGNNFVHRDLAARNVLVSEDNVAKVSDFG
LTKEASSTQDTGKLPVKWTAPEALREKKFSTKSDVWSFGILLWEIYSFGRVPYPRIPL
KDVVPRVEKGYKMDAPDGCPPAVYEVNKNCWHLDAANRPSFLQLREQLEHIKTHELHL
GENBANK ID: L29220
VERSION L29220.1 GI:632969
MHHCIRYRSPEPDPYLSYRWKRRRSYSREHEGRLRYPSRREPPP
RRSRSRSHDRLFYQRRYRERRDSDTYRCEERSPSFGEDYYGPSRSRHRRRSRERGPYR
TRKHAHECHKRRTRSCSSASSMRLWGTWVKAFLARWWSAWTMPEGSLRLP
GENBANK ID: M91815.1
VERSION M91815.1 GI:180169
HOMO SAPIENS FETAL CDNA TO MRNA.

| | |
|---|---|
| 1 | CAGCTGACCC TGCTGGATCA CCTCGCCTTC AAGAAGATTC CTTATGAGGA GTTCTTCGGA |
| 61 | CAAGGATGGA TGAAACTGGA AAAGAATGAA AGGACCCCTT ATATCATGAA AACCACTAAG |
| 121 | CACTTCAATG ACATCAGTAA CTTGATTGCT TCAGAAATCA TCCGCAATGA GGACATCAAC |
| 181 | GCCAGGGTGA GCGCCATCGG GAAGTGGGTG GCCGTAGCTG ACATATGCCG CTGCCTCCAC |
| 241 | AACTACAATG CCGTACTGGA GATCACCTGC TCCATGAACC GCAGTGCAAT CTTCCGGCTC |
| 301 | AAAAAGACGT GGCTCAAAGT CTCTAAGCAG ACTAAAGCTT TGATTGATAA GCTCCAAAAG |
| 361 | CTTGTGTCAT CAGAGGGCAG ATTTAAGAAT CTCAGAGAAG CTCTGAAAAA TTGTGACCCA |
| 421 | CCCTGTGTCC CTTACCTGGG GATGTACCTC ACCGACCTGG CCTTCATCGA GGAGGGGACG |
| 481 | CCCAATTACA CGGAAGACGG CCTGGTCAAC TTCTCCAAGA TGAGGATGAT ATCCCATATT |
| 541 | ATGCCAGAGA TTCGCCAGTT TCAACAAACT GCCTACAAAA TAGAGCACCA AGCAAAGGTA |
| 601 | ACGCAATATT TACTGGACCA ATCTTTTGTA ATGGATGAAG AAAGCCTCTA CGAGTCTTCT |
| 661 | CTCCGAATAG AACCAAAACT CCCCACCTGA AGCTGTGCCC AGACCCAGAC CAGCTGCTCC |
| 721 | CGGGGACATG TGCTAGAIGA TACTGTACAT ATTCGTTTGG TTTCACTGGA TTTTCTTCTT |
| 781 | CAGTATGTGC TTCTCCAAGA AATACAAATC GTCCTTGTTC TTAGATTCCT GTAG |

GENBANK ID: M26708
VERSION M26708.1 GI:190695
MSDAAVDTSSEITTKDLKEKKEVVEEAENGRDAFANGNANEENG
EQEADNEVDEEEEEGGEEEEEEEEGDGEEEDGDEDEEAESATGKRAAEDDEDDDVDTK
KQKTDEDD
GENBANK ID: M81757
VERSION M81757.1 GI:337732
MPGVTVKDVNQQEFVRALAAFLEKSGKLKVPEWVDTVKLAIHKE
LAPYDENWFYTRAASTARHLYLRGGAGVGSNTKIYGGRQRNGVMPSHFSRGSRSVARR
VLQALEGLKMVEKDQDGGRKLTPQGQRDLDRIAGQVAAANEKH
GENBANK ID: V00568
DEFINITION HUMAN MRNA ENCODING THE C-NYC ONCOGENE.
VERSION V00568.1 GI:34815
MPLNV FTNRNYDLDYDSVQPYFYCDEEENFYQQQQQSELQPPA
PSEDIWKKFELLPTPPLSFSRRSGLCSPSYVAVTPFSLRGDNDGGGGSFSTADQLEMV
TELLGGDMVNQSFICDPDDETFIKNIIIQDCNWSGFSAAAKLVSEKLASYQAARKDSG
SPNPARGHSVCSTSSLYLQDLSAAASECIDPSVVFPYPLNDSSSPRSCASQDSSAFSP
SSDSLLSSTESSPQGSPEPLVLHEETPPTTSSDSEEEQEDEEEIDVVSVEKRQAPGKR
SESGSPSAGGHSEPPHSPLVLKRCHVSTHQHNYAAPPSTRKDYPAAKRVKLDSVRVLR
QISNNRKCTSPRSSDTEENVKRRTHNVLERQRRNELKRSFFALRDQIPELENNEIAPK
VVILKKATAYILSVQAEEQKLISEEDLLRKRREQLKHNLEQLRNSCA
GENBANK ID: L29219.1
VERSION L29219.1 GI:632963
MRHSKRTYCPDWDDKDWDYGKWRSSSSHERRERENSSAQENKRC
KYNHSKMCDSHYLESRSINEEDYHSRRYIDEYRNDYTQGCEPGHRQRDHESRYQNHSS
KSSGRSGRSSYKSKHRIHHSTSHRRSHGKSHRRKRTRSVEDDEEGHLICQSGDVLSAR
YEIVDTLGEGAFGKVVECIDHKAGGREVAVKIVKNVDRYCEAARSEIQVLEHLNTTDP
NSTFRCVQMLEWFEHHGHICIVFELLGLSTYDFIKENGFLPFRLDHIRKMAYQICKSV
NFLHSNKLTHTDLKPENILFVQSDYTEAYNPKIKRDERTLINPDIKVVDFGSATYDDE
HHSTLVSTRHYRAPEVILALGWSQPCDVWSIGCILIEYYIGFTVFPTHDSKEHLAMME
RILGPLPKHMIQKTRKRKYFHHDRLDWDEHSSAGRYVSRACKPLKEFMLSQDVEHERL
FDLIQKMLEYDPAKRITLREALKHPFFDLLKKSI
GENBANK ID: U49399.1
VERSION U49399.1 GI:1418220
MLLEEVRAGDRLSGAAARGDVQEVRRLLHRELVHPDALNRFGKT
ALQVMMFGSTAIALELLKQGASPNVQDTSGTSPVHDAARTGFLDTLKVLVEHGADVNV
PDGTGALPIHLAVQEGHTAVVSFLAAESDLHRRDARGLTPLELALQRGAQDLVDILQG
HMVAPL
GENBANK ID: XM_039993.2
VERSION XM_039993.2 GI:16188964
MVSYWDTGVLLCALLSCLLLTGSSS0SKLKDPELSLKGTQHIMQ
AGQTLHLQCRGEAAHKWSLPEMVSKESERLSITKSACGRNGKQFCSTLTLNTAQANHT
GFYSCKYLAVPTSKKKETESAIYIFISDTGRPFVEMYSEIPEIIHMTEGRELVIPCRV
TSPNITVTLKKFPLDTLIPDGKRIIWDSRKGFIISNATYKEIGLLTCEATVN0HLYKT
NYLTHRQTNTIIDVQISTPRPVKLLRGHTLVLNCTATTPLNTRVQMTNSYPDEKNKRA
SVRRRIDQSNSHANIFYSVLTIDKMQNKDKGLYTCRVRSGPSFKSVNTSVHIYDKAFI
TVKHRKQQVLETVAGKRSYRLSMKVKAFPSPEVVWLKDGLPATEKSARYLTRGYSLII
KDVTEEDAGNYTILLSIKQSNVFKNLTATLIVNVKPQIYEKAVSSFPDPALYPLGSRQ
ILTCTAYGIPQPTIKNFNHPCNHNHSEARCDFCSNNEESFILDADSNMGNRIESITQR
MAIIEGKNKMASTLVVADSRISGIYICIASNKVQTVGRNISFYITDVPNGFHVNLEKN
PTEGEDLKLSCTVNKFLYRDVTWILLRTVNNRTMHYSISKQKMAITKEHSITLNLTIM
NVSLQDSGTYACRARNVYTGEEILQKKEITIRDQEAPYLLRNLSDHTVAIESSTTLDC
HANGVPEPQITWFKNNHKIQQEPGIILGPGSSTLFIERVTEEDEGVYHCKATNQKGSV
ESSAYLTVQGTSDKSNLELITLTCTCVAATLFWLLTLFIRKDAKRSSSEIKTDYLSII
MDPDEVPLDEQCERLPYDASKWEFARERLKLGKSLGRGAFGKVVQASAFGIKKSPTCR
TVAVKMLKEGATASEYKALMTELKILTHIGHHLNVVNLLGACTKQGGPLMVIVEYCKY
GNLSNYLKSKRDLFFLNKDAALHMEFKKEKNEPGLEQGKKPRLDSVTSSESFASSGFQ
EDKSLSDVEEEEDSD0FYKEPITMEDLISYSFQVARQNEFLSSRKCIHRDLAARNILL
SENNVVKICDFGLARDIYKNPDYVRKGDTRLPLKWMAPESIFDKIYSTKSDVWSYGVL
LWEIFSLGGSFYPGVQNDEDFCSRLREGNRMRAPEYSTFEIYQIMLDCWHRDPKERPR
FAELVEKLGDLLQANVQQDGKDYIPINAILTGNSGFTYSTPAFSEDFFKESISAPKFN
SGSSDDVRYVNAFKFMSLERIKTFEELLPNATSMFDDYQGDSSTLLASPMLKRFTWTD
SKPKASLKIDLRVTSKSKESGLSDVSRPSFCHSSCGHVSEGKRRFTYDHAELERKIAC
CSPPPDYNSVVLYSTPPI
GENBANK ID: U61262.1
VERSION U61262.1 GI:1621606
CDS 137..4522
/CODON_START=1

| | |
|---|---|
| 1 | GGGCCGGGCC GGGCTGGGCT GGAGCAGCGG CGCCCGGGAG CCGAGCTTGC AGCGAGGGAC |
| 61 | CGGCTGAGGC GCGCGGGAGG GAAGGAGGCA ACGGCTCCGC GGCGCTGTCG CGCTGCCGCT |
| 121 | CACTCTCGGG GAAGAGATGG CGGCGGAGCG GGGAGCCCGG CGACTCCTCA GCACCCCCTC |
| 181 | CTTCTGGCTC TACTGCCTGC TGCTGCTCGG GCGCCGGGCG CCGGGCGCCG CGGCGGCCAG |
| 241 | GAGCGGCTCC GCGCCGCAGT CCCCAGGAGC CAGCATTCGA ACGTTCACTC CATTTTATTT |
| 301 | TCTGGTGGAG CCGGTGGATA CACTCTCAGT TAGAGGCTCT TGTGTTATAT TAAACTGTTC |
| 361 | AGCATATTCT GAGCCTTCTC CAAAAATTGA ATGGAAAAAA GATGGAACTT TTTTAAACTT |
| 421 | AGTATCAGAT GATCGACGCC AGCTTCTCCC GGATGGATCT TTATTTATCA GCAATGTGGT |
| 481 | GCATTCCAAA CACAATAAAC CTGATGAAGG TTATTATCAG TGTGTGGCCA CTGTTGAGAG |
| 541 | TCTTGGAACT ATTATCAGTA GAACAGCGAA CCTCATAGTA GCAGGTCTTC CAAGATTTAC |
| 601 | CAGCCAACCA GAACCTTCCT CAGTTTATGC TGGGAACGGA GCAATTCTGA ATTGTGAAGT |
| 661 | TAATGCAGAT TTGGTCCCAT TTGTGAGGTG GGAACAGAAC AGACAACCCC TTCTTCTGGA |
| 721 | TGATAGAGTT ATCAAACTTC CAAGTGGAAT GCTGGTTATC AGCAATGCAA CTGAAGGAGA |
| 781 | TGGCGGGCTT TATCGCTGCG TAGTGGAAAG TGGTGGGCCA CCAAAGTATA GTCATGAAGT |
| 841 | TGAATTGAAG GTTCTTCCAG ATCCTGAGGT GATATGAGAC TTGGTATTTT TGAAACAGCC |
| 901 | TTCTCCCTTA GTCAGAGTCA TTGGTCACGA TGTAGTGTTG CCATGTGTTG CTTCAGGACT |
| 961 | TCCTACTCCA ACCATTAAAT GGATGAAAAA TGAGGAGGCA CTTGACACAC AAAGCTCTGA |
| 1021 | AAGATTGGTA TTGCTGGCAG GTGGTAGCCT GGAGATCAGT GATGTTACTG AGGATGATGC |
| 1081 | TGGGACTTAT TTTTGTATAG CTGATAATGG AAATGAGACA ATTGAAGCTC AAGCAGAGCT |
| 1141 | TACAGTGCAA GCTCAACCTG AATTCCTGAA GCAGCCTACT AATATATATG CTCACGAATC |
| 1201 | TATGGATATT GTATTTGAAT GTGAAGTGAC TGGAAAACCA ACTCCAACTG TGAAGTGGGT |
| 1261 | CAAAAATGGG GATATGGTTA TCCCAAGTGA TTATTTTAAG ATTGTAAAGG AACATAATCT |
| 1321 | TCAAGTTTTG GGTCTGGTGA AATCAGATGA AGGGTTCTAT CAGTGCATTG CTGAAAATGA |
| 1381 | TGTTGGAAAT GCACAAGCTG GAGCCCAACT GATAATCCTT GAACATGCAC CAGCCACAAC |
| 1441 | GGGACCACTG CCTTCAGCTC CTCGGGATGT CGTGGCCTCC CTGGTCTCTA CCCGCTTCAT |
| 1501 | CAAATTGACG TGGCGGACAC CTGCATCAGA TCCTCACGGA GACAACCTTA CCTACTCTGT |
| 1561 | GTTCTACACC AAGGAAGGGA TTGCTAGGGA ACGTGTTGAG AATACCAGTC ACCCAGGAGA |
| 1621 | GATGCAAGTA ACCATTCAAA ACCTAATGCC AGCGACCGTG TACATCTTTA GAGTTATGGC |
| 1681 | TCAAAATAAG CATGGCTCAG GAGAGAGTTC AGCTCCACTG CGAGTAGAAA CACAACCTGA |
| 1741 | GGTTCAGCTC CCTGGCCCAG CACCTAACCT TCGTGCATAT GCAGCTTCGC CTACCTCCAT |
| 1801 | CACTGTTACG TGGGAAACAC CAGTGTCTGG CAATGGGGAA ATTCAGAATT ATAAGTTGTA |
| 1861 | CTACATGGAA AAGGGGACTG ATAAAGAACA GGATGTTGAT GTTTCAAGTC ACTCTTACAC |
| 1921 | CATTAATGGG TTGAAAAAAT ATACAGAGTA TAGTTTCCGA GTGGTGGCCT ACAATAAACA |
| 1981 | TGGTCCTGGA GTTTCCACAC CAGATGTTGC TGTTCGAACA TTGTCAGATG TTCCCAGTGC |
| 2041 | TGCTCCTCAG AATCTGTCCT TGGAAGTGAG AAATTCAAAG AGTATTATGA TTCACTGGCA |
| 2101 | GCCACCTGCT CCAGCCACAC AAAATGGGCA GATTACTGGC TACAAGATTC GCTACCGAAA |
| 2161 | GGCCTCCCGA AAGAGTGATG TCACTGAGAC CTTGGTAAGC GGGACACAGC TGTCTCAGCT |
| 2221 | GATTGAAGGT CTTGATCGGG GGACTGAGTA TAATTTCCGA GTGGCTGCTC TAACAATCAA |
| 2281 | TGGTACAGGC CCGGCAACTG ACTGGCTGTC TGCTGAAACT TTTGAAAGTG ACCTAGATGA |
| 2341 | AACTCGTGTT CCTGAAGTGC CTAGCTCTCT TCACGTACGC CCGCTCGTTA CTAGCATCGT |
| 2401 | AGTGAGCTGG ACTCCTCCAG AGAATCAGAA CATTGTGGTC AGAGGTTACG CCATTGGTTA |
| 2461 | TGGCATTGGC AGCCCTCATG CCCAGACCAT CAAAGTGGAC TATAAACAGC GGTATTACAC |
| 2521 | CATTGAAAAT CTGGATCCCA GCTCTCACTA TGTGATTACC CTGAAAGCAT TTAATAACGT |
| 2581 | GGGTGAAGGC ATCCCCCTGT ATGAGAGTGC TGTGACCAGG CCTCACACAG ACACTTCTGA |
| 2641 | AGTTGATTTA TTTGTTATTA ATGCTCCATA CACTCCAGTG CCAGATCCCA CTCCCATGAT |
| 2701 | GCCACCACTG GGAGTTCAGG CTTCCATTCT GAGTCATGAC ACCATCAGGA TTACGTGGGC |
| 2761 | AGACAACTCG CTGCCCAAGC ACCAGAAGAT TACAGACTCC CGATACTACA CCGTCCGATG |
| 2821 | GAAAACCAAC ATCCCAGCAA ACACCAAGTA CAAGAATGCA AATGCAACCA CTTTGAGTTA |
| 2881 | TTTGGTGACT GGTTTAAAGC CGAATACACT CTATGAATTC TCTGTGATGG TGACCAAAGG |
| 2941 | TCGAAGATCA AGTACATGGA GTATGACAGC CCATGGGACC ACCTTTGAAT TAGTTCCGAC |
| 3001 | TTCTCCACCC AAGGATGTGA CTGTTGTGAG TAAAGAGGGG AAACCTAAGA CCATAATTGT |
| 3061 | GAATTGGCAG CCTCCCTCTG AAGCCAATGG CAAAATTACA GGTTACATCA TATATTACAG |
| 3121 | TACAGATGTG AATGCAGAGA TACATGACTG GGTTATTGAG CCTGTTGTGG GAAACAGACT |
| 3181 | GACTGACCAG ATACAAGAGT TAACTCTTGA CACACCATAC TACTTCAAAA TCCAGGCACG |
| 3241 | GAACTCAAAG GGCATGGGAC CCATGTCTGA AGCTGTCCAA TTCAGAACAC CTAAAGCGGA |
| 3301 | CTCCTCTGAT AAAATGCCTA ATGATCAAGC CTCAGGGTCT GGAGGGAAAG GAAGCCGGCT |
| 3361 | GCCAGACCTA GGATCCGACT ACAAACCTCC AATGAGCGGC AGTAACAGCC CTCATGGGAG |
| 3421 | CCCCACCTCT CCTCTGGACA GTAATATGCT GCTGGTCATA ATTGTTTCTG TTGGCGTCAT |
| 3481 | CACCATCGTG GTGGTTGTGA TTATCGCTGT CTTTTGTACC CGTCGTACCA CCTCTCACCA |
| 3541 | GAAAAAGAAA CGAGCTGCCT GCAAATCAGT GAATGGCTCT CATAAGTACA AAGGGAATTC |
| 3601 | CAAAGATGTG AAACCTCCAG ATCTCTGGAT CCATCATGAG AGACTGGAGC TGAAACCCAT |
| 3661 | TGATAAGTCT CCAGACCCAA ACCCCATCAT GACTGATACT CCAATTCCTC GCAACTCTCA |
| 3721 | ACATATCACA CCAGTTGACA ACTCCATCCA CAGCAATATC CATCAAAGGC GAAATTCATA |
| 3781 | CAGAGGGCAT GAGTCAGAGG ACAGCATGTC TACACTGGCT GGAAGGCGAG GAATGAGACC |
| 3841 | AAAAATGATG ATGCCCTTTG ACTCCCAGCC ACCCCAGCCT GTGATTAGTG CCCATCCCAT |
| 3901 | CCATTCCCTC GATAACCCTC ACCATCATTT CCACTCCAGC AGCCTCGCTT CTCCAGCTCG |
| 3961 | CAGTCATCTC TACCACCCGG GCAGCCCATG GCCCATTGGC ACATCCATGT CCCTTTCAGA |
| 4021 | CAGGGCCAAT TCCACAGAAT CCGTTCGAAA TACCCCCAGC ACTGACACCA TGCCAGCCTC |
| 4081 | TTCCTCTCAA ACATGCTGCA CTGATCACCA GGACCCTGAA GGTGCTACCA GCTCCTCTTA |
| 4141 | CTTGGCCAGC TCCCAAGAGG AAGATTCAGG CCAGACTCTT CCCACTGCCC ATGTTCGCCC |
| 4201 | TTCCCACCCA TTGAAGAGCT TCGCCGTGCC AGCAATCCCG CCTCCAGGAC CTCCCACCTA |
| 4261 | TGATCCTGCA TTGCCAAGCA CACCATTACT GTCCCAGCAA GCTCTGAACC ATCACATTCA |
| 4321 | CTCAGTGAAG ACAGCCTCCA TCGGGACTCT AGGAAGCAGC CCCCCTCCTA TGCCAGTGGT |
| 4381 | TGTTCCCAGT GCCCCTGAAC TGCAGGAGAC CACAAGGATG TTGGAAGACT CCGAGAGTAG |
| 4441 | CTATGAACCA GATGAGCTGA CCAAAGAGAT GGCCCACCTG GAAGGACTAA TGAAGGACCT |
| 4501 | AAACGCTATC ACAACAGCAT GACGACCTTC ACCAGGACCT GACTTCAAAC CTGAGTCTGG |
| 4561 | AAGTCTTGGA ACTTAACCCT TGAAAACAAG GAATTGTACA GAGTACGAGA GGACAGCACT |
| 4621 | TGAGAACACA GAATGAGCCA GCAGACTGGC CAGCGCCTCT GTGTAGGGCT GGCTCCAGGC |
| 4681 | ATGGCCACCT GCCTTCCCCT GGTCAGCCTG GAAGAAGCCT GTGTCGAGGC AGCTTCCCTT |
| 4741 | TGCCTGCTGA TATTCTGCAG GACTGGGCAC CATGGGCCAA AATTTTGTGT CCAGGGAAGA |
| 4801 | GGCCAGAAGT GCAACCTGCA TTTCACTTTG TGGTCAGGCC GTGTCTTTGT GCTGTGACTG |
| 4861 | CATCACCTTT ATGGAGTGTA GACATTGGCA TTTATGTACA ATTTTATTTG TGTCTTATTT |
| 4921 | TATTTTACCT TCAAAAACAA AAACGCCATC CAAAACCAAG GAAGTCCTTG GTGTTCTCCA |
| 4981 | CAAGTGGTTG ACATTTGACT GCTTGTTCCA ATTATGTATG GAAAGTCTTT GACACTGTGG |
| 5041 | GTCGTTCCTG GGGTTGGCTT GTTTTTTGGT TTCATTTTTA TTTTTTAATT CTGAGTCATT |
| 5101 | GCATCCTCTA CCAGCTGTTA ATCCATCACT CTGAGGGGGA GGAAATGTTG CATTGCTGTT |
| 5161 | TGTAAGCTTT TTTTATTATT TTTTTATTAT AATTATTAAA GGCCTGACTC TTTCCTCTCA |
| 5221 | TCACTGTGAG ATTACAGATC TATTTGAATT GAATGAAATG TAACATTGAA AAAAAAAAAA |
| 5281 | AAAAAAAAAA AAAAAAA |

GENBANK ID: M11730.1
VERSION M11730.1 GI:183986
PRODUCT=“HER2 MRNA”
CDS 151..3918
/CODON_START=1

| | |
|---|---|
| 1 | AATTCTCGAG CTCGTCGACC GGTCGACGAG CTCGAGGGTC GACGAGCTCG AGGGCGCGCG |
| 61 | CCCGGCCCCC ACCCCTCGCA GCACCCCGCG CCCCGCGCCC TCCCAGCCGG GTCCAGCCGG |
| 121 | AGCCATGGGG CCGGAGCCGC AGTGAGCACC ATGGAGCTGG CGGCCTTGTG CCGCTGGGGG |
| 181 | CTCCTCCTCG CCCTCTTGCC CCCCGGAGCC GCGAGCACCC AAGTGTGCAC CGGCACAGAC |
| 241 | ATGAAGCTGC GGCTCCCTGC CAGTCCCGAG ACCCACCTGG ACATGCTCCG CCACCTCTAC |
| 301 | CAGGGCTGCC AGGTGGTGCA GGGAAACCTG GAACTCACCT ACCTGCCCAC CAATGCCAGC |
| 361 | CTGTCCTTCC TGCAGGATAT CCAGGAGGTG CAGGGCTACG TGCTCATCGC TCACAACCAA |
| 421 | GTGAGGCAGG TCCCACTGCA GAGGCTGCGG ATTGTGCGAG GCACCCAGCT CTTTGAGGAC |
| 481 | AACTATGCCC TGGCCGTGCT AGACAATGGA GACCCGCTGA ACAATACCAC CCCTGTCACA |
| 541 | GGGGCCTCCC CAGGAGGCCT GCGGGAGCTG CAGCTTCGAA GCCTCACAGA GATCTTGAAA |
| 601 | GGAGGGGTCT TGATCCAGCG GAACCCCCAG CTCTGCTACC AGGACACCAT TTTGTGGAAG |
| 661 | GACATCTTCC ACAAGAACAA CCAGCTGGCT CTCACACTGA TAGACACCAA CCGCTCTCGG |
| 721 | GCCTGCCACC CCTGTTCTCC GATGTGTAAG GGCTCCCGCT GCTGGGGAGA GAGTTCTGAG |
| 781 | GATTGTCAGA GCCTGACGCG CACTGTCTGT GCCGGTGGCT GTGCCCGCTG CAAGGGGCCA |
| 841 | CTGCCCACTG ACTGCTGCCA TGAGCAGTGT GCTGCCGGCT GCACGGGCCC CAAGCACTCT |
| 901 | GACTGCCTGG CCTGCCTCCA CTTCAACCAC AGTGGCATCT GTGAGCTGCA CTGCCCAGCC |
| 961 | CTGGTCACCT ACAACACAGA CACGTTTGAG TCCATGCCCA ATCCCGAGGG CCGGTATACA |
| 1021 | TTCGGCGCCA GCTGTGTGAC TGCCTGTCCC TACAACTACC TTTCTACGGA CGTGGGATCC |
| 1081 | TGCACCCTCG TCTGCCCCCT GCACAACCAA GAGGTGACAG CAGAGGATGG AACACAGCGG |
| 1141 | TGTGAGAAGT GCAGCAAGCC CTGTGCCCGA GTGTGCTATG GTCTGGGCAT GGAGCACTTG |
| 1201 | CGAGAGGTGA GGGCAGTTAC CAGTGCCAAT ATCCAGGAGT TTGCTGGCTG CAAGAAGATC |
| 1281 | TTTGGGAGCC TGGCATTTCT GCCGGAGAGC TTTGATGGGG ACCCAGCCTC CAACACTGCC |
| 1321 | CCGCTCCAGC CAGAGCAGCT CCAAGTGTTT GAGACTCTGG AAGAGATCAC AGGTTACCTA |
| 1381 | TACATCTCAG CATGGCCGGA CAGCCTGCCT GACCTCAGCG TCTTCCAGAA CCTGCAAGTA |
| 1441 | ATCCGGGGAC GAATTCTGCA CAATGGCGCC TACTCGCTGA CCCTGCAAGG GCTGGGCATC |
| 1501 | AGCTGGCTGG GGCTGCGCTC ACTGAGGGAA CTGGGCAGTG GACTGGCCCT CATCCACCAT |
| 1561 | AACACCCACC TCTGCTTCGT GCACACGGTG CCCTGGGACC AGCTCTTTCG GAACCCGCAC |
| 1621 | CAAGCTCTGC TCCACACTGC CAACCGGCCA GAGGACGAGT GTGTGGGCGA GGGCCTGGCC |
| 1681 | TGCCACCAGC TGTGCGCCCG AGGGCACTGC TGGGGTCCAG GGCCCACCCA GTGTGTCAAC |
| 1741 | TGCAGCCAGT TCCTTCGGGG CCAGGAGTGC GTGGAGGAAT GCCGACTACT GCAGGGGCTC |
| 1801 | CCCAGGGAGT ATCTGAATGC CAGGCACTGT TTGCCCTGCC ACCCTGACTG TCAGCCCCAG |
| 1861 | AATGGCTCAG TGACCTGTTT TGGACCGGAG GCTGACCAGT GTGTGGCCTC TCCCCACTAT |
| 1921 | AAGGACCCTC CCTTCTGCGT GGCCCGCTGC CCCAGCGGTG TGAAACCTGA CCTCTCCTAC |
| 1981 | ATGCCCATCT GGAAGTTTCC AGATGACGAG GGCGCATGCC AGCCTTGCCC CATCAACTGC |
| 2041 | ACGCACTCCT GTGTGGACCT GGATGACAAG GGCTGCCCCG CCGAGCAGAG AGCCAGCCCT |
| 2101 | CTGACGTCCA TCGTCTCTGC GGTGCTTGGC ATTCTGCTGG TCGTGGTCTT GGGGGTGGTC |
| 2161 | TTTGGGATCC TCATCAAGCG ACGGCAGCAG AAGATCCCCA ACTACACCAT CCGGACACTG |
| 2221 | CTGCAGCAAA CGGAGCTGGT GGAGCCCCTG ACACCTAGCG GAGCGATGCC CAACCAGGCG |
| 2281 | CAGATGCGCA TCCTGAAAGA GACGGAGCTG ACGAAGGTGA AGGTGCTTGG ATCTGGCGCT |
| 2341 | TTTGGCACAG TCTACAAGCG CATCTGGATC CCTGATCGGC ACAATGTGAA AATTCCAGTG |
| 2401 | GCCATCAAAG TGTTGAGGGA AAACACATCC CCCAAAGCCA ACAAAGAAAT CTTACACGAA |
| 2461 | GCATACGTGA TGGCTGGTGT GGGCTCCCCA TATGTCTCCC GCCTTCTGGG CATCTCCCTC |
| 2521 | ACATCCACGG TGCAGCTGGT GACACAGCTT ATGCCCTATG GCTGCCTCTT ACACCATGTC |
| 2581 | CGGGAAAACC GCGGACGCCT CGGCTCCCAG GACCTGCTGA ACTGGTGTAT GCAGATTGCC |
| 2641 | AAGGGGATGA GCTACCTGGA GGATGTGCGC CTCCTACACA CGGACTTAGC CGCTCGGAAC |
| 2701 | GTCCTGGTCA AGAGTCCCAA CCATGTCAAA ATTACAGACT TCGGGCTGGC TCGGCTGCTG |
| 2761 | GACATTGACG AGACAGAGTA CCATGCAGAT GGGGGCAAGG TGCCCATCAA GTGGATGGCG |
| 2821 | CTGGAGTCCA TTCTCCGCCG GCGGTTCACC CACCAGAGTG ATGTGTGGAG TTATGGTGTG |
| 2881 | ACTGTGTGGG AGCTGATGAC TTTTGGGGCC AAACCTTACG ATGGGATCCC AGCCCGGGAG |
| 2941 | ATCCCTGACC TGCTCGAAAA GGGGGAGCGG CTGCCCCAGC CCCCCATCTG CACCATTGAT |
| 3001 | GTCTACATGA TCATGGTCAA ATGTTGGATG ATTGACTCTG AATGTCGGCC AAGATTCCGG |
| 3061 | GAGTTGGTGT CTGAATTCTC CCGCATGGCC AGGGACCCCC AGCGCTTTGT GGTCATCCAG |
| 3121 | AATGAGGACT TGGGCCCAGC CAGTCCCTTG GACAGCACCT TCTACCGCTC ACTGCTGGAG |
| 3181 | GACGATGACA TGGGGGACCT GGTGGATGCT GAGGAGTATC TGGTACCCCA GCAGGGCTTC |
| 3241 | TTCTGTCCAG ACCCTGCCCC GCGCGCTGGG GGCATGGTCC ACCACAGGCA CCGCAGCTCA |
| 3301 | TCTACCAGGA GTGGCGGTGG GGACCTGACA CTAGGGCTGG AGCCCTCTGA AGAGGAGGCC |
| 3361 | CCCAGGTCTC CACTGGCACC CTCCGAAGGG GCTGGCTCCG ATGTATTTGA TGGTGACCTG |
| 3421 | GGAATGGGGG CAGCCAAGGG GCTGCAAAGC CTCCCCACAC ATGACGCCAG CCCTCTACAG |
| 3481 | CGGTACAGTG AGGACCCCAC AGTACCCCTG CCCTCTGAGA CTGATGGCTA CGTTGCCCCC |
| 3541 | CTGACCTGCA GCCCCCAGCC TGAATATGTG AACCAGCCAG ATGTTCGGCC CCAGCCCCCT |
| 3601 | TCGCCCCGAG AGGGCCCTCT GCCTGCTGCC CGACCTGCTG GTGCCACTCT GGAAAGGGCC |
| 3661 | AAGACTCTCT CCCCAGGGAA GAATGGGGTC GTCAAAGACG TTTTTGCCTT TGGGGGTGCC |
| 3721 | GTGGAGAACC CCGAGTACTT GACACCCCAG GGAGGAGCTG CCCCTCAGCC CCACCCTCCT |
| 3781 | CCTGCCTTCA GCCCAGCCTT CGACAACCTC TATTACTCGG ACCAGGACCC ACCAGAGCGG |
| 3841 | GGGGCTCCAC CCAGCACCTT CAAAGGGACA CCTACGGCAG AGAACCCAGA GTACCTGGGT |
| 3901 | CTGGACGTGC CAGTGTGAAC CAGAAGGCCA AGTCCGCAGA AGCCCTGATC TGTCCTCAGG |
| 3961 | GAGCAGGGAA GGCCTGACTT CTGCTGGCAT CAAGAGGTGG GAGGGCCCTC CGACCACTTC |
| 4021 | CAGGGGAACC TGCCATGCCA GGAACCTGTC CTAAGGAACC TTCCTTCCTG CTTGAGTTCC |
| 4081 | CAGATGGCTG GAAGGGGTCC AGCCTCGTTG GAAGAGGAAC AGCACTGGGG AGTCTTTGTG |
| 4141 | GATTCTGAGG CCCTGCCCAA TGAGACTCTA GGGTCCAGTG GATGCCACAG CCCAGCTTGG |
| 4201 | CCCTTTCCTT CCAGATCCTG GCTACTGAAA GCCTTAGGGA AGCTGGCCTG AGAGGGGAAG |
| 4261 | CGGCCCTAAG GGAGTGTCTA AGAACAAAAG CGACCCATTC AGAGACTGTC CCTGAAACCT |
| 4321 | AGTACTGCCC CCCATGAGGA AGGAACAGCA ATGGTGTCAG TATCCAGGCT TTGTACAGAG |
| 4381 | TGCTTTTCTG TTTAGTTTTT ACTTTTTTTG TTTTGTTTTT TTAAACACGA AATAAAGACC |
| 4441 | CAGGGGAGAA TGGGTGTTGT ATGGGGAGGC AAGTGTGGGG GGTCCTTCTC CACACCCACT |
| 4501 | TTGTCCATTT GCAAATATAT TTTGGAAAAC |

GENBANK ID: X14798.1
SEQUENCE 1:
MKAAVDLKPTLTIIKTEKVDLELFPSPDMECADVPLLTPSSKEM
MSQALKATFSGFTKEQQRLGIFKDPRQWTETHVRDWVMWAVNEFSLKGVDFQKFCMNG
AALCALGKDCGLELAPDFVGDILWEHLEILQKEDVKPYQVNGVNPAYFESRYTSDYFI
SYGIEHAQCVPPSEFSEPSFITESYQTLHPISSEELLSLKYENDYPSVILRDPLQTDT
LQNDYFAIKQEVVTFDNNCMGRTSRGKLGGQDSFESIESYDSCDRLTQSWSSQSSFNS
LQRVPSYDSFDSEDYPAALPNHKPKGTFKDYVRDRADLNKDKPVIPAAALAGYTGSGP
IQLWQFLLELLTDKSCQSFISWTGDGWEFKLSDPDBVARRWGKRKNKPKMNYEKLSRG
LRYYYDKNIIHKTAGKRYVYRFVCDLQSLLGYTPEELHANLDVKPDADE
SEQUENCE 2;
MKAAVDLKPTLTIIKTEKVDLELFPSPDMECADVPLLTPSSKEM
MSQALKATFSGFTKEQQRLGIPKDFRQWTETHVRDWVNWAVNEFSLKGVDFQKFCMNG
AALCALGKDGFLELAPDFVGDILWEHLEILQKEDVKPYQVNGVNPAYPESRYTSDYFI
SYGIEHAQCVPPSEFSEPSFITESYQTLHPISSEELLSLKYENDYPSVILRDDLQTDT
LQNDYFAIKQEVVTPDNMCNGRTSRGSGPIQLWQFLLELLTDKSCQSFTSWTGDGWEF
KLSDPDEVARRNGKRRNKPKNNYEKLSRGLRYYYDKNIIHKTAGKRYVYRFVCDLQSL
LGYTPEELHAMLDVKPDADE
GENBANK ID: D49547
VERSION D49547.1 GI:710654
MGKDYYQTLGLARGASDEEIKRAYRRQALRYNFDKNKEFGAEEK
FKEIAEAYDVLSDPRKREIFDRYGEEGLKGSGPSGCSGGGANGTSFSYTFHGDPRAMF
AEFFGGRNPFDTFFGQRNGEEGNDIDDFFSGFPMGMGGFTNVNFGRSRSAQEPARKKQ
DPPVTNDLRVSLEEIYSGCTKKMKISHKRLNFDGKSIRNEDKILTIEVKKGWKEGTKI
TEPKEGDQTSNNIPADIVFVLKDKPHNIFKRDGSDVIYPARISLREALCGCTVNVPTL
DGRTIFVVFKDVIRPGMRRKVPGEGLPLPKTPEKRGDLIIEFEVIFPERIPQTSRTVL
EQVLPI
GENBANK ID: M11717
VERSION D49547.1 GI:710654
MGKDYYQTLGLARGASDEEIKRAYRRQALRYHPDKNKEPGAEEK
FKEIAEAYDVLSDPRKREIFDRYGEEGLKGSGPSCGSGGGANGTSFSYTFHGDPHAMF
AEFFGGRNPFDTFFGQRNGEEGNDIDDPFSGFPNGNGGFTNVNFGRSRSAQEPARKKQ
DPPVTHDLRVSLEEIYSGCTKKMKISHKRLNPDGKSIRNEDKILTIEVKKGWKEGTKI
TFPKEGDQTSNNIFADIVFVLKDKPHNIFKRDGSDVIYFARISLREALCGCTVNVPTL
DGRTIPVVFKDVIRPGNRRKVPGEGLFLFKTFEKRGDLIIEFEVIFPERIPQTSRTVL
EQVLPI
GENBANK ID: X76648
VERSION X76648.1 GI:531404
MAQSFVNCKIQFGKVVVFIKPTCPYCRRAQEILSQLPIKQGLLE
FVDITATNHTNEIQDYLQQLTGARTVFRVFIGKDCIGGCSDLVSLQQSGSLLTRLKQI
GALQ
GENBANK ID: NM_011587.1
VERSION NM_011587.1 GI:6755784
MVWWGSSLLLFTLFLASHVGASVDLTLLANLRITDPQRFFLTCV
SGEAGAGRSSDPPLLLSKDDRIVRTIFPGQPLYLARNGSHQVTLRGFSKPSDLVGVFS
CVGGAGARRTRVLYVHNSPGAHLFPDKVTHTVNKGDTAVLSAHVHKEKQTDVIWKNNG
SYFNTLDWQEADDGRFQLQLQNVQPPSSGIYSATYLSASFLGSAFFRLIVRGCGAGRW
GPGCVKDCFGCLHGGVCMDMDGSCVCPPGFTGTRQSQACRSGRFGQSCQSQCPGTAGC
RGLTFCLPDPYGCSCGSGWRGSQCQSACAPDHFGADCRLQCQCQNGGTCDRFSGCVCP
SGWHGVHCEKSDRIPQILSMATSVSFNIGTMPRINCAAAGNPFPVRGSMKLRKPDGTM
LLSTKVIVEPDRTTASFSVFSLTLGDSGFWECRVSTSGGQDSRRFKVNVKVPPVPLTA
PRLLAKQSRQLVVSPLVSFSGDGPISSVRLEYRPQDSTIAWSAIVVDPSSNVTLMNLK
PKTGYNVRVQLSRPGEGGEGGWGPSALMTTDCPEPLLQFWLSSWNVEGPDRLRVSWSL
PSVPLSGDGFLLRLMDGARGQSRRSNISFPQARTALLTGLTPGTHYQLDVRLYHCTLL
GPASPPAMVNLPPSGPPAPRELHAQALSDSEIQLMWQHPSAPSGPISKYIVSIQVAGG
SGDFQWMDVDRPESTSIIVRGLNASTRYLFRVRASVQGLGDWSNTVSSATLGNGLQSE
DPVRESRAASEGLDQQLVLAVVGSVSATCLTILAALLALVCIRRSCLHRRRTFTYQSG
SGEETILQFSSGTLTLTRRFKFQFSPLSYFVLEWEDITFSDLIGSGNFGQVIRAMIKK
DGLKMNAAIKNLKEYASENDMRDFAGELEVLCKLGBHFNIINLLGACSNRGYLYIAIE
YAPYGNLLDFLRKSRVLSTDPAFARSHGTASTLSSRQLLRFASDAANGMQYLSSKQFI
HRDLAARNVLVGENLASKIADFGLSRGEEVYVKKTNGRLPVRWMAISSLNYSVYTTKS
DVWSFGVLLWEIVSLGGTPYCGMTCAELYEKLPQGYRMEQPRNCDDEVYSLMRQCWRD
RRYERPPFAQIALQLGRMLSARKAYVNMSLFENFTYAGIDATASSA
GENBANK ID: NM_002867.1
VERSION NM_002867.1 GI:4506368
MASVTDGKMGVKDASDQNFDYMFKLLIIGNSSVGKTSFLLRYAD
DTFTPAFVSTVGIDFKVKTVYRMSKRVKLQIWDTAGQSRYRTITTAYYRGANGFILMY
DITNESSFNAVQDWATQIKTYSNDNAQVILVGNKCDMEEERVVPTSKGQLLASQLGFD
FFEASAKENISVRQAFSRLVDAICDKMSDSLDTDPSMLGSSKNTRLSDTPPLLQQNCS
C
GENBANK ID: 027361
NO VERSION DATA
LNENQRLAVERILSGDCRPLPYILEQPPGTQKTVTIIEAVLQVH
FALPDSRILVCAPSNSAADLVCLRLHESKVLQPATMVRVGHFTHVFVDEAGQASEPEC
LIPLGLMSDISGQIVLAQDPMQLGPVIKSRLAMAYGLNVSFLERLMSRPAYQRDENAF
GACGANNPLLVTKLVKNYRSHEALLMLPSRLFYHRELEVCADPTVVTSLLGWEKLPKK
GFPLIFHGVRQSEAREGKSPSWFNPAEAVQVLRYCCLLAHSISSQVSASDIGVITPYR
KQVEKIRILLRNVDLMDIKVGSVEEFQGQEYLVIIISTVRSNEDRFEDDRYFLGFLSN
SKRFNVAITRPKALLIVLGNPHVLVRDPCFGALLEYSITNGVYMGCDLPPALQSLQNC
GEGVADPSYPVVPESTGPEKHQEPS
GENBANK ID: NM_002752.1
VERSION NM_002752.1 GI:4506096
MSDSKCDSQFYSVQVADSTFTVLKRYQQLKPIGSGAQGIVCAAF
DTVLGISVAVIKLSRPFQNQTHAKRAYRELVLLKCVNHKNIISLLNVFTPQKTLEEFQ
DVYLVMELMDANLCQVIHMELDHERMSYLLYQMLCGIKHLHSAGIIHRDLKPSNIVVK
SDCTLKILDFGLARTACTNFMMTPYVVTRYYRAPEVILGMGYKENVDIWSVGCIMGEL
VKGCVIFQGTDHIDQMNKVIEDLGTPSAEFMKKLQPTVRNYVENRPKYPGIKFEELFP
DWIFPSESERDKIKTSQARDLLSKMLVIDPDKRISVDEALRHPYITVWYDPAEAEAPP
PQIYDAQLEEREHAIEEWKELIYKEVMDWEERSKNGVVKDQPSAQMQQ
GENBANK ID: M22262.1
VERSION M22382.1 GI:190126
MLRLPTVFRQMRPVSRVLAPHLTRAYAKDVKFGADARALMLQGV
DLLADAVAVTMGPKGRTVIIEQSWGSPKVTKDGVTVAKSIDLKDKYKNIGAKLVQDVA
NNTNEEAGDGTTTATVLARSIAKEGFEKISKGANPVEIRRGVMLAVDAVIAELKKQSK
PVTTPEEIAQVATISANGDKEIGNIISDAMKKVGRKGVITVKDGKTLNDELEIIEGMK
FDRGYISPYFINTSKGQKCEFQDAYVLLSEKKISSIQSIVPALEIANAHRKPLVIIAE
DVDGEALSTLVLNRLKVGLQVVAVKAPGF0DNRKNQLKDMAIATGGAVFGEEGLTLNL
EDVQPHDLGKVGEVIVTKDDAMLLKQKGDKAQIEKRIQEIIEQLDVTTSEYEKEKLNE
RLAKLSDGVAVLKVCGTSDVEVNEKKDRVTDALNATRAAVEEGIVLGGGCALLRCIPA
LDSLTPANEDQKIGIEIIKRTLKIPAMTIAKNAGVEGSLIVEKIMQSSSEVGYDAMAG
DFVNMVEKGIIDPTKVVRTALLDAAGVASLLTTAEVVVTEIPKEEKDPGMGAMGGMGG
GMGGGMF
GENBANK ID: U09564.1
DEFINITION HUMAN SERINE KINASE MRNA, COMPLETE CDS.
VERSION U09564.1 GI:507212
MERKVLALQARKKRTKAKKDKAQRKSETQHRGSAPHSESDLPEQ
EEEILGSDDDEQEDPNDYCKGGYHLVKIGDLFNGRYHVIRKLGWGHFSTVWLSWDIQG
KKFVAMKVVKSAEHYTETALDEIRLLKSVRNSDPNDPNREMVVQLLDDFKISGVNGTH
ICMVFEVLGHHLLKWIIKSNYQGLPLPCVKKIIQQVLQGLDVLHTKCRIIHTDIKPEN
ILLSVNEQYIRRLAAEATENQRSGAPPPSGSAVSTAPQPKPADKMSKNKKKKLKKKQK
RQAELLEKRMQEIEEMEKESGPGQKRPNKQEESESPVERPLKENPPNKMTQEKLEESS
TIGQDQTLMERDTEGGAAEINCNGVIEVINYTQNSNNETLRHKEDLHNANDCDVQNLN
QESSFLSLPNGDSSTSQETDSCTPITSEVSDTMVCQSSSTVGQSFSEQHISQLQESIR
AEIPCEDEQEQEHNGPLDNKGKSTAGNFLVNPLEPKNAEKLKVKIADLGNACWVHKHF
TEDIQTRQYRSLEVLIGSGYNTPADIWSTACMAFELATGDYLFEPNSGEEYTRDEDHI
ALIIELLGKVPRKLIVAGKYSKEFFTKKGDLKNITKLKPNGLFEVLVEKYEWSQEEAA
GFTDFLLPMLELIPEKRATAAECLRHPWLNS
GENBANK ID: M11507.1
VERSION M11507.1 GI:239515
MMDQARSAFSNLFGGEPLSYTRFSLARQVDGDNSHVEMKLAVDE
EENADNNTKANVTKPKRCSGSICYGTIAVIVFFLIGFMIGYLGYCKGVEPKTECERLA
GTESPVREEPGEDFPAARRLVWDDLKRKLSEKLDSTDFTSTIKLLNENSYVPREAGSQ
KDENLALYVENQFREFKLSKVWRDQHFVKIQVKDSAQNSVIIVDKNGRLVYLVENPGG
YVAYSKAATVTGKLVHANFGTKKDFEDLYTPVNGSIVIVRAGKITFAEKVANAESLNA
IGVLIYMDQTKFPIVNAELSFFGHAHLGTGDPYTPGFPSFNHTQFPPSRSSGLPNIFV
QTISRAAAEKLFGNMEGDCPSDWKTDSTCRMVTSESKNVKLTVSNVLKEIKILNIFGV
IKGFVEPDHYVVVGAQRDAWGPGAAKSGVGTALLLKLAQNFSDMVLKDGFQPSRSIIF
ASWSAGDFGSVGATENLEGYLSSLHLKAFTYINLDKAVLGTSNFKVSASPLLYTLIEK
TMQNVKHPVTGQFLYQDSNNASKVEKLTLDNAAFPFLAYSGIPAVSFCFCEDTDYPYL
GTTMDTYKELIERIPELNKVARAAAEVAGQFVIKLTHDVELNLDYERYNSQLLSFVRD
LNQYRADTKEMGLSLQWLYSARCDFFRATSRLTTDFGNAEKTDRFVMKKLNDRVMRVE
YHFLSFYVSPKESPFRHVFWGSGSHTLPALLENLKLRKQNNGAFNETLFRNQLALATW
TIQGAANALSGDVWDIDNEF
GENBANK ID: 055017.1
VERSION 055017.1 GI:1297296
MESYHKFDQQKLQALKDTANRLRISSIQATTAAGSGHPTSCCSA
AEIMAVLFFHTMRYKSQDPRNPHNDIRFVLSKGHAAPILYAVWAEAGFLEAELLNLRK
ISSDLDGNPVFKQAFTDVATGSLGQGLGAACGMAYTGKYFDKASYRVYCLLGDGELSE
GSVWEAMAFASIYKLDNLVAILDINRLGQSDPAPLQNQNDIYQKRCEAFGWHAIIVDG
HSVEELCKAFCQAKHQFTAIIAKTFKGRGITGVEDKESWHGKPLPKNMAEQIIQEIYS
QIQSKKKILATFPQEDAPSVDIANIRMPSLPSYKVGDKIATRKAYGQALAKLGHASDR
IIALDGDTKNSTFSEIFKKEHPDRFIECYIAEQNNVSIAVGCATRNRTVPFCSTFAAF
FTRAFDQIRMAAISESNINLCGSHCGVSIGEDGPSQMALEDLAMFRSVPTSTVFYPSD
GVATEKAVELAANTKGICFIRTSRPENAIIYNNNEDFQVGQAKVVLKSKDDQVTVIGA
GVTLHEALAAAELLKKEKINIRVLDPFTIKPLDRKLILDSARATKCRILTVEDHYYEG
GIGEAVSSAVVGEFGITVTNLAVNRVPRSGKPAELLKMFGIDRDAIAQAVRGLITKA
GENEANK ID: X14034.
VERSION X14034.1 GI:35513
MSTTVNVDSLAEYEKSQIKRALELGTVNTVFSFRKSTFERRTVQ
VIMETRQVAWSKTADKIEGFLDINEIKEIRPGKNSKDFEPAKAVRQKEDCCFTILYGT
QFVLSTLSLAADSKEDAVNWLSGLKILHQEAMNASTPTIIESWLRKQIYSVDQTRRNS
ISLRELKTILPLINFKVSSAKFLKDKFVEIGAHKDELSFEQFHLFYKKLNFEQQKSIL
DEFKKDSSVFILGNTDRPDASAVYLHDFQRFLIHEQQENWAQDLNKVRERMTKFIDDT
MRETAEPFLFVDEFLTYLFSRENSTWDEKYDAVDNQDMNNPLSHYWISSSNNTYLTGD
QLRSESSPEAYIRCLRNGCRCIELDCWDGPDGKFVIYHGWTRTTKIKFDDVVQAIKDH
AFVTSSFPVILSIEEHCSVEQQRHMAKAFKEVFGDLLLTKPTEASADQLPSPSQLREK
IIIKNKKLGFPQDVDVNMEDKKDEHKQQGELYMWDSIDQKNTRHYCAIADAKLSFSDD
IEQTNEEEVFQDIFFTELNFGEKWFHKKVEKRTSAEKLLQEYCNETGGKDGTFLVRES
ETFPNDYTLSFWRSGRVQNCRIRSTNEGGTLKYYLTDNLRFRRNYALIQHYRETHLPC
AEFELRLTDFVFNPNPHESKPWYYDSLSRGEAEDMLNRIPRDGAFLIRKRECSDSYAI
TFRARGKVKHCRINRDGRHFVLGTSAYFESLVELVSYYEKHSLYRKNRLRYFVTPELL
ERYNTERDINSLYDVSRNYVDPSEINPSMPQRTVKALYDYKAKRSDELSFCRGALIHN
VSKEPGGNWKGDYGTRIQQYFFSNYVEDISTADFEELEKQIIEDNPLGSLCRGILDLN
TYNVVKAFQGKNQKSFVFILEPKEQ0DPPVEFATDRVEELFEWFQSIREITWKIDSKE
NNMKYWEKNQSIAIELSDLVVYCKFTSKTKDNLENPDFREIRSFVETKADSIIRQKPV
DLLKYNQKGLTRVYFKQQRVDSSNYDPFRLNLCGSQNVALNFQTADKYNQNNRALFSL
NGRTGYVLQFESNRTEKYDPNFFESQRKILMTLTVKVLGARHLPKLGRSIACPFVEVE
ICGAEYGNNKFKTTVVNDNGLSPIWAPTQEKVTFEIYDFNLAFLRFVVYEEDNFSDPN
FLAHATYPIKAVKSGPRSVFLKNGYSEDIELASLLVFCEMRPVLESEEELYSSCRQLR
RRQEELNNQLFLYDTHQNLRNANRDALVKEFSVNENHSSCTRRNATRG
GENBANK ID: M27691.1I
VERSION 1627691.1 GI:181038
NTMESGAENQQSCDAAVTEAENQQNTVQAQPQIATLAQVSMPAA
HATSSAPTVTLVQLPNGQTVQVHCVIQAAQPSVIQSPQVQTVQISTIAESEDSQESVD
SVTDSQKRREILSRRFSYRKILNDLSSDAFGVPRIEEEKSEEETSAFAITTVTVFTPI
YQTSSGQYIAITQGGAIQLANNGTDGVQGLQTLTNTNAAATQPGTTILQYAQTTDGQQ
ILVPSNQVVVQAASGDVQTYQIRTAPTSTIAPGVVMASSPALPTQPAEEAARKREVRL
MKNREAARECRRKKKEYVKCLENRVAVLENQNKTLIEELKALKDLYCHKSD
GENBANK ID: 1618391
VERSION 1618391.1 GI:339716
MERRWPLGLGLVLLLCAPLPPGARAKEVTTJIVIDTSKAQGELGWLL
DFPKDGWSEQQQILNGTPLYNYQDCPNQGRRDTDNWLRSNWIYRCEEASRVRVELQFT
VRDCKSFPGGAGFLGCKETFNLLYNESDQDVCIQLRRPLFQKVTTVAADQSFTIRDLA
SGSVKLNVERCSLGRLTRRGLYLAFHNPGACVALVSVRVFYQRCPETLNGLAQFPDTL
PGPAGLVEVACTCLPHARASPRFSCAPRNHCSPDGEWLVPVGRCHCEFGYEEGGSGEA
CVACPSGSYRNDMDTPHCLTCFQQSTAESEGATICTCESGHYRAFGEGPQVACTGPPS
APRNLSFSASGTQLSLRWEPPADTGGRQDVRYSVRCSQCQCTAQDGGPCQPCGVGVHF
SPGARALTTPAVEVNGLEFYANYTFNVEAQNGVSGLGSSGHASTSVSISMGNAESLSG
LSLRLVKKEPRQLELTWAGSRPRSPGANLTYELHVLNQDEERYQNVLEFRVLLTELQP
DTTYIVRVRMLTPLGPGPFSPDNEFRTSPFVSRGLTGGEIVAVIFGLLLGAALLLGIL
VFRSRRAQRQRQQRHVTAPPNWIERTSCAEALCGTSRHTRTLHREPWTLPCGWSNFPS
RELDFAWLNVDTVIGEGEFGEVYRGTLRLPSQDCKTVAIKTLKDTSPGCQWWNFLREA
TIMGQFSNFHILHLECVVTKRKPIMIITEFNENAALDAFLREREDQLVPGQLVAMLQG
IASGMNYLSNHNYVNRDLAARNILVNQNLCCKVSDFCLTRLLDDFDGTYETQGGKIPI
RWTAPEAIANRIFTTASDVWSFGIVNWEVLSFGDKPYGENSNQEVNKSIEDCYRLPPP
VDCPAPLYELMKNCWAYDRARRPNFQKLQAHLEQLLANPNSLRTIANFDPRVTLRLPS
LSGSDGIFVRTVSEWLESIRMKRYILHFHSAGLDTMECVLELTAEDLTQNGITLPGHQ
KRILCSIQGFKD
GENBANK ID: X54079.1
VERSION X54079.1 GI:32477
MTERRVPFSLLRGPSWDPERDWYPHSDLFDQAFGLPRLEEWSQ
WLGGSSWFGYVRPLPFAAIESPAVAAFAYSRALSRQLSSGVSEIRHTADRWRVSLDVN
HFAFDELTVKTKDGVVEITGKHEERQDEHGYISRCFTRKYTLFPGVDPTQVSSSLSFE
GTLTVEAPMPKLATQSNEITTPVTFESRAQLGGPEAAKSDETAAK
GENBANK ID: XM_012654.3
VERSION XM_012654.3 GI:14773503
MFGVTLWEMFSGGEEPWACVPPYLILQRLEDFARLPRPPLCSRA
LYSLALDCWAPHPSDRPSFSHLEGLLQEAGPSEACCVRDVTEFGALRNETGDPITVIE
GSSSFHSPDSTIWKGQNGRTFKVGSWPASAVTLADAGGLPATRPVHRGHPCFGRSTPR
KHRWRQKEGKSLGCAFSTGPEEEHAPGEDERNFQESGVSSVPRSSSHRGXVQAPLKXR
QARAXAPGTSRFASTPTFIL
GENBANK ID: XM_054457.2
VERSION XM_054457.2 GI:18590931
MASATDSRYGQKESSDQNFDYNFKILIIGNSSVGKTSFLFRYAD
DSFTPAFVSTVGIDFKVKTIYRNDKRIKLQIWDTAGQERYRTITTAYYRGANGFILMY
DITNEESFNAVGDWSTQIKTYSWDNAQVLLVGNKCDMEDERVVSSERGRQLADHLGFE
FFEASAKDNINVKQTFERLVDVICEKMSESLDTADPAVTGAKQGPQLSDQQVFPHQDC
AC
GENBANK ID: XM_038595.3
VERSION XM_038595.3 GI:18590923
MAPPSEETPLIPQRSCSLLSTEAGALEVLLPARGPGPPQRLSFS
FGDHLAEDLCVQAAKASGILPVYHSLFALATEDLSCWFPPSHIFSVEDASTQVLLYRI
RFYFPNWFGLEKCHRFGLRKDLASAILDLPVLEHLFADHRSDLVSGRLFVGLSLKEQG
ECLSLAVLDLARMAREQAQRPGELLKTVSYKACLPPSLRDLIQGLSFVTRRRIRRTVR
RALRRVAACQADRHSLMAKYIMDLERLDPAGAAETFHVGLPGALGGHDGLGLLRVAGD
GGIAWTQGEQEVLQPFCDFPEIVDISIKQAPRVGPAGEHRLVTVTRTDNQILEAEFPG
LPEALSFVALVDGYFRLTTDSQHFFCKEVAPPRLLEEVAEQCHGPITLDFAINKLKTG
GSRPGSYVLRRSPQDFDSFLLTVCVQNPLGPDYKGCLIRRSPTGTFLLVGLSRFHSSL
RELLATCWDGGLHVDGVAVTLTSCCIPRPKEKSNLIVVQRGHSPFTSSLVQPQSQYQL
SQMTFHKIPADSLEWHENLGHGSFTKIYRGCRHEVVDGEARKTEVLLKVMDAKHKNCM
ESFLEAASLWSQVSYRHLVLLHGVCMAGDSTWVQEFVHLGAIDMYLRKRGHLVPASWK
LQVVKQLAYALNYLEDKGLFHGNVSARKVLLAREGADGSPPFIKLSDFGVSFAVLSLE
MLTDRIPWVAPECLREAQTLSLEADKWGFGATVWEVFSGVTMPISALDPAKKLQFYED
RQQLFAPKWTELALLIQQCMAYEFVQRPSFRAVIRDLNSLISSDYELLSDFTPGALAP
RDGLWNGAQLYACQDPTIFEERHLKYISGLGKGNFGSVELCRYDPLGDNTGALVAVKQ
LQHSGPDQQRDFQREIQILKALHSDFIVKYRGVSYGPGRQSLRLVMEYLPSGCLRDFL
QRHRARLDASRLLLYSSQICKGMEYLGSRRCVHRDLAARNILVESEAHVKIADFGLAK
LLPLDKDYYVVREPGQSPIFWYAPESLSDNIFSRGSDVWSFGVVLYELFTYCDKSCSP
SAEFLRMMGCERDVPALCRLLELLEEGQRLPAPPACPAEVHELMKLCWAPSPQDRPSF
SALGFQLDMLWSGSRGCETHAFTAHFEGKHHSLSFS
GENBANK ID: NM_002755.2
VERSION NM_002755.2 GI:14589898
MPKKKPTPIQLNPAPDGSAVNGTSSAETNLEALQKKLEELELDE
QQRKRLEAFLTQKQKVGELKDDGFEKISELGAGNGGVVFKVSHKPSGLVMARKLTHLE
IKPAIRNQIIRELQVLHECNSFYIVGFYGAFYSDGEISICMEENDGGSLDQVLKKAGR
IPEQILGKVSIAVIKGLTYLREKNKIMNRDVKPSNILVNSRGEIKLCDFGVSGQLIDS
MANSFVGTRSYMSFERLQGTHYSVQSDIWSMGLSLVEMAVGRYPIPPFDAKELELMFG
CQVEGDAAETPPRFRTPGRPLSSYGMDSRPPMAIFELLDYIVNEPFPKLPSGVFSLEF
QDFVNKCLIKNPAERADLKQLMVRAFIKRSDAEEVDFAGWLCSTIGLNQPSTPTHAAG
V
GENBANK ID: NM_001744.1
VERSION NM_001744.1 GI:4502556
MLKVTVFSCSASSCSSVTASAAPGTASLVPDYWIDGSNRDALSD
FFEVESELGRGATSIVYRCKQKQTQKPYALKVLKKTVDKKIVRTEIGVLLRLSHPNII
KLKEIFETFTEISLVLELVTGGELFDRIVEKGYYSERDAADAVKQILEAVAYLHENGI
VHRDLKFENLLYATPAPDAPLKIADFGLSKIVEHQVLMKTVCGTPGYCAPEILRGCAY
GPEVDMWSVGIITYILLCCFEPFYDERGDQFMFRRILNCEYYFISPWWDEVSLNAKDL
VRKLIVLDPKKRLTTFQALQHPWVTGKAANFVHMDTAQKKLQEFNARRKLKAAVKAVV
ASSRLCSASSSHGSIQESRKASRDPSPIQDGNEDMKAIPEGEKIQGDGAQAAVKGAQA
ELMKVQALEKVKGADINAEEAPKMVPKAVEDGIKVADLELEECLAEEKLKTVEEAAAP
REGQGSSAVGFEVPQQDVILPEY
GENBANK ID: XM_053461.2
VERSION XM_053461.2 GI:13553657
MASRGATRPNGPNTGNKICQFKLVLLGESAVGKSSLVLRFVKGQ
FHEFQESTGAAFLTQTVCLDDTTVKFEIWDTAGQERYEHSLAPMYYRGAQAAIVVYDI
TNEESFARAKNMVKELQRQASPNIVIALSGNKADLANKRAVDFQEAQSYADDNSLLFM
ETSAKTSMNVNEIFMAIAKKLPKNEPQNPGANSARGRGVDLTEPTQPTRNQCCSN
GENBANK ID: U33635.1
VERSION U33635.1 GI:1016701
MGAARGSPARPRRLPLLSVLLLPLLGGTQTAIVFIKQPSSQDAL
QGRRALLRCEVEAPGPVHVYWLLDGAPVQDTERRFAQGSSLSFAAVDPLQDSGTFQCV
ARDDVTGEEARSANASFNIKWIEAGPVVLKHPASEAEIQPQTQVKLRCHIDGMPRFTY
QWFRDGTPLSDGQSNHTVSSKERNLTLRPAGPEHSGLYSCCAHSAFSQACSSQNFTLS
IADESFARVVLAPQDVVVARYEEAMFHCQFSAQPPPSLQWLFEDETPITNRSRPPHLR
RATVFANGSLLLTQVRPRNAGIYRCIGQGQRGPPIILEATLHLAEIEDMPLFEPRVFT
AGSEERVTCLPPKGLFEPSVWWEHAGVRLFTHGRVYQKGHELVLANIAESDAGVYTCH
AANLAGQRRQDVNITVATVPSWLKKPQDSQLEECKPGYLDCLTQATPKFTVVWYRNQM
LISEDSRFEVFKNGTLRINSVEVYDGTWYRCMSSTPAGSIEAQAVLQVLEKLKFTPPP
QPQQCMGFDKEATVFCSATGREKPTIKWERADGSSLPEWVPDNAGTLHFARVTRDDAG
NYTCIASNGPQGQIRAHVQLTVAVFITFKVEPERITVYQGHTALLQCEAQGDPKPLIQ
WKGKDRILDPTKLGPRMHIFQNCSLVIHDVAPEDSGRYTCIAGNSCNIKHTEAPLYVV
DKPVPEESEGPGSPPPYKMIQTIGLSVGAAVAYIIAVLGLMFYCKKRCKAKRLQKQPE
GEEPEMECLNGGPLQNGQPSAEIQEEVALTSLGSGPAATNKRHSTSDKMHFPRSSLQP
ITTLGKSEFGEVFLAKAQGLEEGVAETLVLVKSLQSKDEQQQLDFRRELEMFGKLNHA
NVVRLLGLCREAEPHYMVLEYVDLEDLKQFLRISKSKDEKLKSQPLSIKQKVALCTQV
ALGMEHLSNNRFVNKDLAARNCLVSAQRQVKVSALGLSKDVYNSEYYHFRQANVALRW
MSPEAILEGDFSTKSDVNASGVLMWEVFTHGEMPHGGQADDEVLADLQAGKARLFQPE
GCPSKLYRLMQRCWALSPKDRPSESEIASALGDSTVDSKP
GENBANK ID: XM_004559.5
VERSION XM_004559.5 GI:17464405
MGPEALSSLLLLLLVASGDADMKGHFDPAKCRYALGMQDRTIPD
SDISASSSNSDSTAARHSRLESSSDGDGAWCPAGSVFPKEEEYLQVDLQRLHLVALGT
QGRHAGGLGKEFSRSYRLRYSRDGRRWMGWKDRWGQEVIS0NEDFEGVVLKDLGPPMV
ARLVRFYFRADRVMSVCLRVELYGCLWRDGLLSYTAPVGQTNYLSEAVYLNDSTYDGH
TVGGLQYGGLGQLADGVVGLDDFRKSQELRVWPGYDYVGWSNHSFSSGYVEMEFEFDR
LRAFQAMQVHCNNMHTLGARLPGGVECRFRRGFAMAWEGEPMRHNLGGNLGDPRARAV
SVPLGGRVARFLQCRFLFACPNLLFSEISFISDVVNNSSPALGGTFPPAPNNPPGPPP
TNFSSLELEPRGQQPVAKAEGSPTAILIGCINAIILLLLLIIALMLWRLHWRRLLSKA
ERRVLEEELTVHLSVPGDTILINNRPGPREPPPYQEPRPRGNFPHSAPCVPNGSALLL
SNPAYRLLLATYARPPRGPGFPTPAWAKPTNTQAYSGDYMEPEKPGAPLLFPPFQNSV
PEYAEADIVTLQCVTGGNTYAVPALPPGAVGDGPPRVDFPRSRLRFKEKLGEGQFGEV
HLCEVDSPQDLVSLDFPLNVRKGHPLLVAVKILRPDATKNARNDFLKEVKINSRLKDP
NIIRLLGVCVQDDPLCMITDYMENGDLNQELSAHQLEDKAAEGAPGDGQAAQGPTISY
PMLLHVAAQIASGMRYLATLNFVHRDLATRNCLVGENFTIKIAGFGMSRNLYAGDYYR
VQGRAVLPIRWMAWECILNGKFTTASDVWAFGVTLWEVLMLCRAQPEGQLTDEQVIEN
AGEFFRDQGRQVYLSRPPACPQGLYELMLRCWSRESEQRPPFSQLHRFLAEDALNTV
GENBANK ID: M28212.1
VERSION M28212.1 GI:550071
/GENE=“RAB6”
CDS 71..697
/CODON_START=1

| | |
|---|---|
| 1 | AGCTGGCTGG AGCAGGATCG GTCCGGGACG GTCICTAGGC TGAGGCGGCG GCCGCTCCTC |
| 61 | TAGTTCCACA ATGTCCACGC GGGGAGACTT CGCGAATCCG CTGACGAAAT TCAAGCTGGT |
| 121 | GTTCCTGGGG GAGCAAAGCG TTGGAAAGAC ATCTTTGATC ACCAGATTCA TGTATGACAG |
| 181 | TTTTGACAAC ACCTATCAGG CAACAATTGG CATTGACTTT TTATCAAAAA CTATGTACTT |
| 241 | GGAGGATCGA ACAGTACGAT TGCAATTATG GGACACACCA GGTCAAGAGC GGTTCAGGAG |
| 301 | CTTGATTCCT AGCTACATTC GTGACTCCAC TGTGGCAGTT GTTGTTTATG ATATCACAAA |
| 361 | TGTTAACTCA TTCCAGCAAA CTACAAAGTG GATTGATGAT GTCAGAACAG AAAGAGGAAG |
| 421 | TGATGTTATC ATCATGCTAG TAGGAAATAA AACAGATCTT GCTGACAAGA GGCAAGTGTC |
| 481 | AATTGAGGAG GGAGAGAGGA AAGCCAAAGA GCTGAATGTT ATGTTTATTG AAACTAGTGC |
| 541 | AAAAGCTGGA TACAATGTAA AGCAGCTCTT TCGACGTGTA GCAGCAGCTT TGCCGGGAAT |
| 601 | GGAAAGCACA CAGGACAGAA GCAGAGAAGA TATGATTGAC ATAAAACTGG AAAAGCCTCA |
| 661 | GGAGCAACCA GTCAGTGAAG GAGGCTGTTC CTGCTAATGT CCCTAGTCAT CTTCAACCTT |
| 721 | CTTCAGAAGC TCACTGCTTT |

GENBANK ID: M65066.1
VERSION M65066.1 GI:307376
/GENE=“PRKAR1B”
CDS <1..1144
/CODON_START=2

| | |
|---|---|
| 1 | GGCCTCCCCG CCCGCCTGCC CCTCGGAGGA GGACCAGAGC CTGAAGGGCT GTGAGCTGTA |
| 61 | CGTGCAGCTG CACGGGATCC AGCAGGTCCT CAAAGACTGT ATCGTCCACC TCTGCATCTC |
| 121 | CAAGCCCGAA CGCCCCATGA AGTTCCTCCG GGAGCACTTC GAGAAGCTGG AGAAGGAAGA |
| 181 | AAACAGGCAG ATTTTGGCGC GGCAAAAGTC AAACTCACAG TCGGACTCCC ATGATGAGGA |
| 241 | GGTGTCGCCC ACCCCCCCGA ACCCTGTGGT GAAGGCCCGC CGCCGGCGAG GAGGCGTGAG |
| 301 | TGCCGAGGTG TACACCGAGG AGGACGCCGT GTCCTACGTC AGGAAGGTGA TTCCCAAGGA |
| 361 | CTACAAAACC ATGACTGCGC TGGCCAAGGC CATCTCCAAG AACGTGCTCT TCGCTCACCT |
| 421 | GGATGACAAC GAGAGGAGTG ACATATTCGA TGCCATGTTC CCTGTCACTC ACATCGCTGG |
| 481 | GGAGACTGTT ATACAGCAAG GGAATGAAGG AGACAACTTC TATGTCGTTG ATCAAGGGGA |
| 541 | AGTGGATGTG TACGTGAACG GAGAGTGGGT GACCAACATC AGCGAGGGAG GCAGCTTCGG |
| 601 | GGAGCTGGCG CTCATCTACG GCACCCCCAG GGCTGCGACC GTGAAAGCCA AGACGGACCT |
| 661 | CAAGCTCTGG GGGATCGACC CGGACAGCTA CCGGCGCATC CTTATGGGCA GCACGCTGAG |
| 721 | GAAACGCAAG ATGTACGAGG AGTTCCTCAG CAAGGTCTCC ATCCTAGAGT CCCTGGAGAA |
| 781 | GTGGGAGCGT CTGACCGTGG CGGATCGGCT GGAGCCCGTC CAGTTTGAAG ATGGAGAGAA |
| 841 | AATTGTGGTC CAGGGAGAGC CTCGGGACCA CTTTTACATC ATCACGGAGG GCACCGCGTC |
| 901 | CGTGCTGCAG CGCCGGTCCC CCAATGAGGA CTACCTCGAG GTGGGGCGCC TGGGACCCTC |
| 961 | TGACTACTTC GCGGAGATTC CACTCCTCCT GAACCGGCCC CGGGCGGCCA CTGTCGTGGC |
| 1021 | CCGGGGGCCC CTCAAGTGTG TGAAGCTGGA CCGGCCCCGC TTCGAGCGTG TGCTGGGGCC |
| 1081 | CTGCTCTGAG ATCCTCAAGA GGAACATTCA GCGTTACAAC AGCTTCATCT CCCTCACCGT |
| 1141 | CTGAGCACAC GTCCCGCCCT GCAGCCCCAG CTCCCCAGTG TGGTGGCCGT GCCTGCTCGT |
| 1201 | CTGTGTCGGG GGCCCGGGAG CCGCTGTGTG AGGIGIGGCC CGGGTGGGGC TGGGTCCCGG |
| 1261 | CAGCGTGAGG ACTGCCCCTT CCCCGGACTC ACTTTTTGGA ATAAATGATC ACCTTCTCCA |
| 1321 | TTTCCAAATC AAAGGACAAG CGGACAAAAT GCATCCCAAG ATCAAGGAAG GGACAGCCCA |
| 1381 | GCTTCCTCCC CACACGCCTC CCCGGCTGCC TCTGTGGGCT TCTCCTGGGG GGCCCACCCC |
| 1441 | ACCCCTGCCA GTCTCCTGGA GATGCTTGAG GATCGGTCCT CCCCAGAAGC AGGCCAGGAC |
| 1501 | GTTGCCCCTG GCGGCTGGTG ACCCTGTGAG GTCAGGTCCC CCAGATTGAG GTCTGAGTGT |
| 1561 | GGGCAAGTGT GTCAAAAGGG GCTGCCCCCC AGGAGATGAG GCTGAGAGCA GGGAGTTGAG |
| 1621 | GCCGAAGAAG TCAAGGCCCC TCCCGCAAAT GTGTACCCCT GCCCGCGCCA CTGCACCCCG |
| 1681 | CCGCACCCCC ACCTCCCCGG GGGCCCTGCT GCGGATCGCG GACTGGGAGA GTCTCTGAGC |
| 1741 | TATGAGATTG ATCTTGCCCC TAATTGGAGA GGAAGCCGGG CGCCAAGACA CACGGGGCTC |
| 1801 | CTGCCTTGGG AGCCAGGGCC GCGGCCGCAG GTAGACCCCA GTAGGGGGGG CCGGGCTCGA |
| 1861 | AGTTCCTTTG GGAGGGGCTG GCCGGACTCC AGCAGGCCCT CCTCACCTTT CTTAGAAAGT |
| 1921 | CCACCCAGGG CAAGTTGATG TTGGGGGAAA GCAGAAGTCA AGCCAGCCGC GGCCCCACAC |
| 1981 | GCCCCCACCC GCTCAACCGA CTTGTCCCTT AAATGTGTCT TGGATCCCGC AGTGATGACG |
| 2041 | TGAGCCAGCC AGGCCCGAAA AGGTGAGGCC ACTGCAGAGA AGCTTCCCAG GGGATTCCTG |
| 2101 | GTTCCCCCGA AACACAAGCG AGGTCATTGC AGTTCACCCG ATGTTGCTCC TGTCCCGTGC |
| 2161 | GTCCCCGGGA GGCTGTCCTT GGTCCGCATG GCTCGTTGCA GCCCCTCCCC TGCTGGCGGT |
| 2221 | TACGATGCGT GGGGTCCCCC TCCCCACCCA GCCCCGGCAC CGTCGCCGTG TCCCGCCTGT |
| 2281 | GCCTGTGACG TCCCTGTGGA CCTGTGAGCC ATCCCCCCCT TATCTCTGCT CTGAATACTG |
| 2341 | CATGAAGCAT TAAACGTGCA ATGAAG |

GENBANK ID: U04897.1
VERSION U04897.1 GI:451563
CDS 102..1673
/CODON_START=1

| | |
|---|---|
| 1 | GTTTTTTTTT TTTTTTTGGT ACCATAGAGT TGCTCTGAAA ACAGAAGATA GAGGGAGTCT |
| 61 | CGGAGCTCGC ATCTCCAGCG ATCTCTACAT TGGGAAAAAA CATGGAGTCA GCTCCGGCAG |
| 121 | CCCCCGACCC CGCCGCCAGC GAGCCAGGCA GCAGCGGCGC GGACGCGGCC GCCGGCTCCA |
| 181 | GGGAGACCCC GCTGAACCAG GAATCCGCCC GCAAGAGCGA GCCGCCTGCC CCGGTGCGCA |
| 241 | GACAGAGCTA TTCCAGCACC ACCAGAGGTA TCTCAGTAAC GAAGAAGACA CATACATCTC |
| 301 | AAATTGAAAT TATTCCATGC AAGATCTGTG GAGACAAATC ATCAGGAATC CATTATGGTG |
| 361 | TCATTACATG TGAAGGCTGC AAGGGCTTTT TCAGGAGAAG TCAGCAAAGC AATGCCACCT |
| 421 | ACTCCTGTCC TCGTCAGAAG AACTGTTTGA TTGATCGAAC CAGTAGAAAC CGCTGCCAAC |
| 481 | ACTGTCGATT ACAGAAATGC CTTGCCCTAG GGATGTCTCG AGATGCTGTA AAATTTGGCC |
| 541 | GAATGTCAAA AAAGCAGAGA GACAGCTTGT ATGCAGAAGT ACAGAAACAC CGGATGCAGC |
| 601 | AGCAGCAGCG CGACCACCAG CAGCAGCCTG GAGAGGCTGA GCCGCTGACG CCCACCTACA |
| 661 | ACATCTCGGC CAACGGGCTC ACGGAACTTC ACGACGACCT CAGTAACTAC ATTGACGGGC |
| 721 | ACACCCCTGA GGGGAGTAAG GCACACTCCG CCGTCAGCAG CTTCTACCTG GACATACAGC |
| 781 | CTTCCCCAGA CCAGTCAGGT CTTGATATCA ATGGAATCAA ACCAGAACCA ATATGTGACT |
| 841 | ACACACCAGC ATCAGGCTTC TTTCCCTACT GTTCCTTCAC CAACGGCGAG ACTTCCCCAA |
| 901 | CTGTGTCCAT GGCAGAATTA GAACACCTTG CACAGAATAT ATCTAAATCG CATCTGGAAA |
| 961 | CCTGCCAATA CTTGAGAGAA GAGCTCCAGC AGATAACGTG GCAGACCTTT TTACAGGAAG |
| 1021 | AAATTGAGAA CTATCAAAAC AAGCAGCGGG AGGTGATGTG GCAATTGTGT GCCATCAAAA |
| 1081 | TTACAGAAGC TATACAGTAT GTGGTGGAGT TTGCCAAACG CATTGATGGA TTTATGGAAC |
| 1141 | TGTGTCAAAA TGATCAAATT GTGCTTCTAA AAGCAGGTTC TCTAGAGGTG GTGTTTATCA |
| 1201 | GAATGTGCCG TGCCTTTGAC TCTCAGAACA ACACCGTGTA CTTTGATGGG AAGTATGCCA |
| 1261 | GCCCCGACGT CTTCAAATCC TTAGGTTGTG AAGACTTTAT TAGCTTTCTG TTTGAATTTG |
| 1321 | GAAAGAGTTT ATCTTCTATG CACCTGACTG AAGATGAAAT TGCATTATTT TCTGCATTTG |
| 1381 | TACTGATGTC AGCAGATCGC TCATGGCTGC AAGAAAAGGT AAAAATTGAA AAACTGCAAC |
| 1441 | AGAAAATTCA GCTAGCTCTT CAACACGTCC TACAGAAGAA TCACCGAGAA GATGGAATAC |
| 1501 | TAACAAAGTT AATATGCAAG GTGTCTACAT TAAGAGCCTT ATGTGGACCA CATACAGAAA |
| 1561 | AGCTAATGGC ATTTAAAGCA ATATACCCAG ACATTGTGCG ACTTCATTTT CCTCCATTAT |
| 1621 | ACAAGGAGTT GTTCACTTCA GAATTTGAGC CAGCAATGCA AATTGATGGG TAAATGTTAT |
| 1681 | CACCTAAGCA CTTCTAGAAT GTCTGAAGTA CAAACATGAA AAACAAACAA AAAAATTAAC |
| 1741 | CGAGACACTT TATATGGCCC TGCACAGACC TGGAGCGCCA CACACTGCAC ATCTTTTGGT |
| 1801 | GATCGGGGTC AGGCAAAGGA GGGGAAACAA TGAAAACAAA TAAAGTTGAA CTTGTTTTTC |
| 1861 | TCA |

GENBANK ID: P53667
DBEST ID: 1741245
EST NAME: AN07C08.S1
ACTGGGCTCCCCGGTCTCCCATCGCAAGGACCTGGGTCGCTCTGAGTCCCTCCGCGTAGT
CTGCCGGCCACACCGCATCTTCCGGCCGTCGTATCTCATCCACGGTGAGGTGCTGGGCAA
GGGCTGCTTCGGCTATGCTATCAATGTGACATACTGTGAGACAGGTGATGTGATGGTGAT
GAAGGAGCTGATCCGGTTCGACGAGGAGACCCAGAGGACGTTCCTCAACGAGGTGAATGT
CATT
GENBANK ID: NM_002737.1
VERSION NM_002737.1 GI:4506066
CDS 28..2046

| | |
|---|---|
| 1 | GGAGCAAGAG GTGGTTGGGG GGGGACCATG GCTGACGTTT TCCCGGGCAA CGACTCCACG |
| 61 | GCGTCTCAGC ACGTGGCCAA CCGCTTCGCC CCCAAACGCG CGCTGAGGCA GAAGAACGTG |
| 121 | CACGAGGTGA AGGACCACAA ATTCATCGCG CGCTTCTTCA AGCAGCCCAC CTTCTCCAGC |
| 181 | CACTGCACCG ACTTCATCTG GGGGTTTGGG AAACAAGGCT TCCAGTGCCA AGTTTGCTGT |
| 241 | TTTGTGGTCC ACAAGAGCTG CCATGAATTT CTTACTTTTT CTTGTCCGGC TGCGGATAAG |
| 301 | GGACCCGACA CTGATGACCC CAGGAGCAAC CACAAGTTCA AAATCCACAC TTACGCAAGC |
| 361 | CCCACCTTCT GCGATCACTC TGGGTCACTG CTCTATGGAC TTATCCATCA AGCGATGAAA |
| 421 | TCTGACACCT GCGATATGAA CGTTCACAAC CAATGCGTCA TCAATGTCCC CACCGTGTGC |
| 481 | GCAATCGATC ACACTGAGAA GAGGGCGCGG ATTTACCTAA AGGCTGAGCT TGCTGATCAA |
| 541 | AAGCTCCATG TCACAGTACG ACATGCAAAA AATCTAATCC CTATGGATCC AAACGGCCTT |
| 601 | TCAGATCCTT ATGTGAAGCT GAAACTTATT CCTGATCCCA AGAATGAAAG CAACCAAAAA |
| 661 | ACCAAAACCA TCCGCTCCAC ACTAAATCCG CAGTGCAATG ACTCCTTTAC ATTCAAATTG |
| 721 | AAACCTTCAG ACAAAGACCG ACGACTGTCT GTACAAATCT GCGACTGCGA TCGAACAACA |
| 781 | AGGAATCACT TCATGGGATC CCTTTCCTTT GGAGTTTCGC ACCTGATGAA GATCCCGGCC |
| 841 | AGTGGATGGT ACAAGTTCCT TAACCAACAA GAACGTGAGT ACTACAACGT ACCCATTCCC |
| 901 | GAACGGGACG AGGAAGGAAA CATCGAACTC ACGCAGAAAT TCGAGAAACC CAAACTTCCC |
| 961 | CCTGCTGCCA ACAAAGTCAT CAGTCCCTCT GAAGACAGGA AACAACCTTC CAACAACCTT |
| 1021 | GACCGAGTGA AACTCACGGA CTTCAATTTC CTCATGGTGT TGGGAAACGC CAGTTTTCCA |
| 1081 | AAGGTCATGC TTGCC3ACAG GAAGGGCACA GAACAACTGT ATGCAATCAA AATCCTGAAG |
| 1141 | AACGATGTGG TGATTCAGCA TGATGACGTG GAGTGCACCA TGGTAGAAAA GCGACTCTTC |
| 1201 | GCCCTGCTTG ACAAACCCCC GTTCTTGACC CAGCTGCACT CCTCCTTCCA GACAGTGGAT |
| 2261 | CGGCTCTACT TCGTCATGGA ATATGTCAAC GGTGGGGACC TCATGTACCA CATTCAGCAA |
| 1321 | GTAGGA~AAT TTAAGGAACC ACAAGCAGTA TTCTATGCGC CAGAGATTTC CATCGGATTG |
| 1381 | TTCTTTCTTC ATAAAAGAGG AATCATTTAT AGGGATCTCA ACTTACATAA CGTCATGTTG |
| 1441 | GATTCAGAAG GACATATCAA AATTGCTGAC TTTGGGATGT GCAAGGAACA CATGATGGAT |
| 1501 | GGAGTCACGA CCAGGACCTT CTGTGCGACT CCACATTATA TCGCCCCAGA GATAATCCCT |
| 1561 | TATCAGCCGT ATGGAAAATC TGTGGACTGG TGGGCCTATC CCGTCCTGTT GTATGAAATG |
| 1621 | CTTGCCGCGC AGCCTCCATT TGATGGTCAA GATGAAGACG AGCTATTTCA GTCTATCATG |
| 1681 | GAGCACAACG TTTCCTATCC AAAATCCTTG TCCAAGCAGC CTGTTTCTAT CTGCAAAGGA |
| 1741 | CTGATGACCA AACACCCAGC CAAGCGCCTG GGCTGTGGGC CTGAGGGGGA GAGGGACGTG |
| 1801 | AGAGAGCATG CCTTCTTCCG GAGGATCGAC TGGGAAAAAC TGGAGAACAG GGAGATCGAG |
| 1861 | CCACCATTCA AGCCCAAAGT GTGTGGCAAA GGACCACAGA ACTTTGACAA GTTCTTCACA |
| 1921 | CGAGGACAGC CCGTCTTAAC ACCACCTGAT CAGCTGGTTA TTGCTAACAT AGACCAGTCT |
| 1981 | GATTTTGAAG GGTTCTCGTA TGTCAACCCC CAGTTTGTGC ACCCCATCTT ACAGACTGCA |
| 2041 | GTATGAAACT CACCAGCGAG AACAAACACC TCCCCAGCCC CCAGCCCTCC CCGCAGTGGA |
| 2101 | AGTGAATCCT TAACCCTAAA ATTTTAAGGC CACGGCTTGT GTCTGATTCC ATATGGAGGC |
| 2161 | CTGAAAATTG TAGGGTTATT AGTCCAAATG TGATCAACTG TTCAGGGTCT CTCTCTTACA |
| 2221 | ACCAAGAACA TTATCTTAGT GGAAG |

GENBANK ID: M16038.1
VERSION M16038.1 GI:187268
MGCIKSKGKDSLSDDGVDLKTQPVRNTERTIYVRDPTSNKQQRP
VPESQLLPGQRFQTKDPEEQGDIVVALYPYDGIHPDDLSFKKGEKMKVLEEHGEWWKA
KSLLTKKEGFIPSNYVAKLNTLETEEWFFKDITRKDAERQLLAPGNSAGAFLIRESET
LKGSFSLSVRDFDPVHGDVIKHYKIRSLDNGGYYISPRITFPCISDMIKHYQKQADGL
CRRLEKACISPKPQKPWDRDANEIPRESIKLVKRLGAGQFGEVWMGYYNNSTKVAVKT
LKPGTNSVQAFLEEANLMKTLQHDKLVRLYAVVTREEPIYIITEYMAKGSLLDFLKSD
EGGKVLLPKLIDFSAQIAEGMAYIERKNYIHRDLRAANVLVSESLMCKIADFGLARVI
EDNEYTAREGAKFPIKWTAPEAINFGCFTIKSDVWSFGILLYEIVTYGKIPYPGRTNA
DVMTALSQGYRMPRVENCPDELYDIMKNCWKEKAEERPTFDYLQSVLDDFYTATEGQY
QQQP
GENBANK ID: 012128.1
VERSION 012128.1 GI:557287
CDS 218..7690
/GENE=“PTP1E”
/CODON_START=1

| | |
|---|---|
| 1 | CTGATTATGA AGTGCCTCAG AGCCAACCTA TTAAGCTTGG AGATCATCTC AACAGCATAC |
| 61 | TGCTTGGAAT GTGTGAGGAT GTTAITTACG CTCGAGTTTC TGTICGGACT GTGCTGGATG |
| 121 | CTTGCAGTGC CCACATTAGG AATAGCAATT GTGCACCCTC ATTTTCCTAC GTGAAACACT |
| 181 | TGGTAAAACT GGTICTGGGA AATCTTTCTG GGGTAATATG CACGTGTCAC TAGCTGAGGC |
| 241 | CCTGGAGGTT CGGGGTGGAC CACTTCAGGA GGAAGAAATA TGGGCTGTAT TAAATCAAAG |
| 301 | TGCTGAAAGT CTCCAAGAAT TATTCAGAAA AGTAAGCCTA GCTGATCCTG CTGCCCTTGG |
| 361 | CTTCATCATT TCTCCATGGT CTCTGCTGTT GCTGCCATCT GGTAGTGTGT CATTTACAGA |
| 421 | TGAAAATATT TCCAATCAGG ATCTTCCAGC ATTCACTGCA CCAGAGGTTC TTCAAAATCA |
| 481 | GTCACTAACT TCTCTCTCAG ATGTTGAAAA GATCCACATT TATTCTCTTG GAATGACACT |
| 541 | GTATTGGGGG GGTGATTATG AAGTGCCTCA GAGCCAACCT ATTAAGCTTG GAGATCATCT |
| 603 | CAACAGCATA CTGCTTGGAA TGTGTGAGGA TGTTATTTAC GCTCGAGTTT CTGTTCGGAC |
| 661 | TGTGCTGGAT GCTTGCAGTG CCCACATTAG GAATAGCAAT TGTGCACCCT CATTTTCCTA |
| 721 | CGTGAAACAC TTGGTAAAAC TGGTTCTGGG AAATCTTTCT GCGACAGATG AGCTTTCCTG |
| 781 | TAACAGTGAA CAAAAGCCTG ATCGAAGCCA GGCTATTCGA GATCGATTGC GAGGAAAAGG |
| 841 | ATTACCAACA GGAAGAAGCT CTAGTTCTGA TGTACTAGAC ATACAAAAGC CTCCACTCTC |
| 901 | TCATCAGACC TTTCTTAACA AAGGGCTTAG TAAATCTATG GGATTTCTGT CCATCAAAGA |
| 961 | TACACAAGAT GAGAATTATT TCAAGGACAT TTTATCAGAT AATTCTGGAC GTGAAGATTC |
| 1021 | TGAAAATACA TTCTCCCCTT ACCAGTTCAA AACTAGTGGC CCAGAAAAAA AACCCATCCC |
| 1081 | TGGCATTGAT GTGCTTTCTA AGAAGAAGAT CTGGGCTTCA TCCATGGACT TGCTTTGTAC |
| 1141 | AGCTGACAGA GACTTCTCTT CAGGAGAGAC TGCCACATAT CGTCGTTGTC ACCCTGAGGC |
| 1201 | AGTAACAGTG CGGACTTCAA CTACTCCTAG AAAAAAGGAG GCAAGATACT CAGATGGAAG |
| 1261 | TATAGCCTTG GATATCTTTG GCCCTCAGAA AATGGATCCA ATATATCACA CTCGAGAATT |
| 1321 | GCCCACCTCC TCAGCAATAT CAAGTGCTTT CGACCGAATC CGAGAGAGAC AAAAGAAACT |
| 1381 | TCAGGTTCTG AGGGAAGCCA TGAATGTAGA AGAACCAGTT CGAAGATACA AAACTTATCA |
| 1441 | TGGTGATGTC TTTAGTACCT CCAGTGAAAG TCCATCTATT ATTTCCTCTG AATCAGATTT |
| 1501 | CAGACAAGTG AGAAGAAGTG AAGCCTCAAA GAGGTTTGAA TCCAGCAGTG GTCTCCCAGG |
| 1561 | GGTAGATGAA ACCTTAAGTC AAGGCCAGTC ACAGAGACGG AGCAGACAAT ATGAAACACC |
| 1621 | CTTTGAAGGC AACTTAATTA ATCAAGAGAT CATGCTAAAA CGGCAAGAGG AAGAACTGAT |
| 1681 | GCAGCTACAA GCCAAAATGG CCCTTAGACA GTCTCGGTTG AGCCTATATC CAGGAGACAC |
| 1741 | AATCAAAGCG TCCATGCTTG ACATCACCAG GGATCCGTTA AGAGAAATTG CCCTAGAAAC |
| 1801 | AGCCATGACT CAAAGAAAAC TGAGGAATTT CTTTGGCCCT GAGTTTGTGA AAATGACAAT |
| 1861 | TGAACCATTT ATATCTTTGG ATTTGCCACG GTCTATTCTT ACTAAGAAAG GGAAGAATGA |
| 1921 | GGATAACCGA AGGAAAGTAA ACATAATGCT TCTGAACGGG CAAAGACTGG AACTGACCTG |
| 1981 | TGATACCAAA ACTATATGTA AAGATGTGTT TGATATGGTT GTGGCACATA TTGGCTTAGT |
| 2041 | AGAGCATCAT TTGTTTGCTT TAGCTACCCT CAAAGATAAT GAATATTTCT TTGTTGATCC |
| 2101 | TGACTTAAAA TTAACCAAAG TGGCCCCAGA GGGATGGAAA GAAGAACCAA AGAAAAAGAC |
| 2161 | CAAAGCCACT GTTAATTTTA CTTTGTTTTT CAGAATTAAA TTTTTTATGG ATGATGTTAG |
| 2221 | TCTAATACAA CATACTCTGA CGTGTCATCA GTATTACCTT CAGCTTCGAA AAGATATTTT |
| 2281 | GGAGGAAAGG ATGCACTGTG ATGATGAGAC TTCCTTATTG CTGGCATCCT TGGCTCTCCA |
| 2341 | GGCTGAGTAT GGAGATTATC AACCAGAGGT TCATGGTGTG TCTTACTTTA GAATGGAGCA |
| 2401 | CTATTTGCCC GCCAGAGTGA TGGAGAAACT TGATTTATCC TATATCAAAG AAGAGTTACC |
| 2461 | CAAATTGCAT AATACCTATG TGGGAGCTTC TGAAAAAGAG ACAGAGTTAG AATTTTTAAA |
| 2521 | GGTCTGCCAA AGACTGACAG AATATGGAGT TCATTTTCAC CGAGTGCACC CTGAGAAGAA |
| 2581 | GTCACAAACA GGAATATTGC TTGGAGTCTG TTCTAAAGGT GTCCTTGTGT TTGAAGTTCA |
| 2641 | CAATGGAGTG CGCACATTGG TCCTTCGCTT TCCATGGAGG GAAACCAAGA AAATATCTTT |
| 2701 | TTCTAAAAAG AAAATCACAT TGCAAAATAC ATCAGATGGA ATAAAACATG GCTTCCAGAC |
| 2761 | AGACAACAGT AAGATATGCC AGTACCTGCT GCACCTCTGC TCTTACCAGC ATAAGTTCCA |
| 2821 | GCTACAGATG AGAGCAAGAC AGAGCAACCA AGATGCCCAA GATATTGAGA GAGCTTCGTT |
| 2881 | TAGGAGCCTG AATCTCCAAG CAGAGTCTGT TAGAGGATTT AATATGGGAC GAGCAATCAG |
| 2941 | CACTGGCAGT CTGGCCAGCA GCACCCTCAA CAAACTTGCT GTTCGACCTT TATCAGTTCA |
| 3001 | AGCTGAGATT CTGAAGAGGC TATCCTGCTC AGAGCTGTCG CTTTACCAGC CATTGCAAAA |
| 3061 | CAGTTCAAAA GAGAAGAATG ACAAAGCTTC ATGGGAGGAA AAGCCTAGAG AGATGAGTAA |
| 3121 | ATCATACCAT GATCTCAGTC AGGCCTCTCT CTATCCACAT CGGAAAAATG TCATTGTTAA |
| 3181 | CATGGAACCC CCACCACAAA CCGTTGCAGA GTTGGTGGGA AAACCTTCTC ACCAGATGTC |
| 3241 | AAGATCTGAT GCAGAATCTT TGGCAGGAGT GACAAAACTT AATAATTCAA AGTCTGTTGC |
| 3301 | GAGTTTAAAT AGAAGTCCTG AAAGGAGGAA ACATGAATCA GACTCCTCAT CCATTGAAGA |
| 3361 | CCCTGGGCAA GCATATGTTC TAGGAATGAC TATGCATAGT TCTGGAAACT CTTCATCCCA |
| 3421 | AGTACCCTTA AAAGAAAATG ATGTGCTACA CAAAAGATGG AGCATAGTAT CTTCACCAGA |
| 3481 | AAGGGAGATC ACCTTAGTGA ACCTGAAAAA AGATGCAAAG TATGGCTTGG GATTTCAAAT |
| 3541 | TATTGGTGGG GAGAAGATGG GAAGACTGGA CCTAGGCATA TTTATCAGTT CAGTTGCCCC |
| 3601 | TGGAGGACCA GCTGACTTGG ATGGATGCTT GAAGCCAGGA GACCGTTTGA TATCTGTGAA |
| 3661 | TAGTGTGAGT CTGGAGGGAG TCAGCCACCA TGCTGCAATT GAAATTTTGC AAAATGCACC |
| 3721 | TGAAGATGTG ACACTTGTTA TCTCTCAGCC AAAAGAAAAG ATATCCAAAG TGCCTTCTAC |
| 3781 | TCCTGTGCAT CTCACCAATG AGATGAAAAA CTACATGAAG AAATCTTCCT ACATGCAAGA |
| 3841 | CAGTGCTATA GATTCTTCTT CCAAGGATCA CCACTGGTCA CGTGGTACCC TGAGGCACAT |
| 3901 | CTCGGAGAAC TCCTTTGGGC CGTCTGGGGG CCTGCGGGAA GGAAGCCTGA GTTCTCAAGA |
| 3961 | TTCCAGGACT GAGAGTGCCA GCTTGTCTCA AAGCCAGGTC AATGGTTTCT TTGCCAGCCA |
| 4021 | TTTAGGTGAC CAAACCTGGC AGGAATCACA GCATGGCAGC CCTTCCCCAT CTGTAATATC |
| 4081 | CAAAGCCACC GAGAAAGAGA CTTTCACTGA TAGTAACCAA AGCAAAACTA AAAAGCCAGG |
| 4141 | CATTTCTGAT GTAACTGATT ACTCAGACCG TGGAGATTCA GACATGGATG AAGCCACTTA |
| 4201 | CTCCAGCAGT CAGGATCATC AAACACCAAA ACAGGAATCT TCCTCTTCAG TGAATACATC |
| 4261 | CAACAAGATG AATTTTAAAA CTTTTTCTTC ATCACCTCCT AAGCCTGGAG ATATCTTTGA |
| 4321 | GGTTGAACTG GCTAAAAATG ATAACAGCTT GGGGATAAGT GTCACGGTAC TGTTTGACAA |
| 4281 | GGGAGGTGTG AATACGAGTG TCAGACATGG TGGCATTTAT GTGAAAGCTG TTATTCCCCA |
| 4441 | GGGAGCAGCA GAGTCTGATG GTAGAATTCA CAAAGGTGAT CCCGTCCTAC CTGTCAATGG |
| 4501 | AGTTAGTCTA GAAGGAGCCA CCCATAAGCA AGCTCTGGAA ACACTCACAA ATACAGGACA |
| 4561 | GGTGCTTCAT CTGTTATTAG AAAAGGGACA ATCTCCAACA TCTAAAGAAC ATGTCCCGGT |
| 4621 | AACCCCACAG TGTACCCTTT CAGATCAGAA TGCCCAAGGT CAAGGCCCAG AAAAACTGAA |
| 4681 | GAAAACAACT CAGGTCAAAG ACTACAGCTT TGTCACTGAA GAAAATACAT TTGAGGTAAA |
| 4741 | ATTATTTAAA AATAGCTCAG GTCTAGGATT CAGTTTTTCT CGAGAAGATA ATCTTATACC |
| 4801 | GGAGCAAATT AATGCCAGCA TAGTAAGGGT TAAAAAGCTC TTTCCTGGAC AGCCAGCAGC |
| 4861 | AGAAAGTGGA AAAATTGATC TAGGAGATGT TATCTTGAAA GTGAATGGAG CCTCTTTGAA |
| 4921 | AGGACTATGT CAGCAGGAAG TCATATCTGC TCTCAGGGGA ACTGCTGCAG AAGTATTCTT |
| 4981 | GCTTCTCTGC AGACCTCCAC CTGGTGTGCT ACCGGAAATT GATACTGCGC TTTTGACCCC |
| 5041 | ACTTCAGTCT CCAGCACAAG TACTTCCAAA CAGCAGTAAA GACTCTTCTC AGCCATCATG |
| 5101 | TGTGGAGCAA AGCACCAGCT CAGATGAAAA TGAAATGTCA GACAAAAGCA AAAAACAGTG |
| 5161 | CAAGTCCCCA TCCAGAAGAG ACAGTTACAG TGACAGCAGT GGGAGTGGAG AAGATGACTT |
| 5221 | AGTGACAGCT CCAGCAAACA TATCAAATTC GACCTGGAGT TCAGCTTTGC ATCAGACTCT |
| 5281 | AAGCAACATG GTATCACAGG CACAGAGTCA TCATGAAGCA CCCAAGAGTC AAGAAGATAC |
| 5241 | CATTTGTACC ATGTTTTACT ATCCTCAGAA AATTCCCAAT AAACCAGAGT TTGAGGACAG |
| 5401 | TAATCCTTCC CCTCTACCAC CGGATATGGC TCCTGGGCAG AGTTATCAAC CCCAATCAGA |
| 5461 | ATCTGCTTCC TCTAGTTCGA TGGATAAGTA TCATATACAT CACATTTCTG AACCAACTAG |
| 5521 | ACAAGAAAAC TGGACACCTT TGAAAAATGA CTTGGAAAAT CACCTTGAAG ACTTTGAACT |
| 5581 | GGAAGTACAA CTCCTCATTA CCCTAATTAA ATCAGAAAAA GGAAGCCTGG GTTTTACAGT |
| 5641 | AACCAAAGCC AATCAGAGAA TTGGTTGTTA TGTTCATGAT GTCATACAGG ATCCAGCCAA |
| 5701 | AAGTGATGGA AGGCTAAAAC CTCGGGACCG GCTCATAAAG GTTAATGATA CAGATGTTAC |
| 5761 | TAATATGACT CATACAGATG CAGTTAATCT GCTCCGGGCT GCATCCAAAA CAGTCAGATT |
| 5821 | AGTTATTCGA CGAGTTCTAG AATTACCCAG AATACCAATG TTGCCTCATT TGCTACCGGA |
| 5881 | CATAACACTA ACGTGCAACA AAGAGGAGTT GGGTTTTTCC TTATGTGGAG GTCATGACAG |
| 5941 | CCTTTATCAA GTGGTATATA TTAGTGATAT TAATCCAAGG TCCGTCGCAG CCATTGAGGG |
| 6001 | TAATCTCCAG CTATTAGATG TCATCCATTA TGTGAACGGA GTCAGCACAC AAGGAATGAC |
| 6061 | CTTGGAGGAA GTTAACAGAG CATTAGACAT CTCACTTCCT TCATTGGTAT TGAAACCAAC |
| 6121 | AAGAAATGAT CTTCCAGTGG TCCCCAGCTC AAAGAGGTCT GCTGTTTCAG CTCCAAAGTC |
| 6181 | AACCAAAGGC AATGGTTCCT ACAGTGTGGG GTCTTCCAGC CAGCCTGCCC TCACTCCTAA |
| 6241 | TGATTCATTC TCCACGGTTG CTGGGGAAGA AATAAATGAA ATATCGTACC CCAAAGGAAA |
| 6301 | ATGTTCTACT TATCAGATAA AGGGATCACC AAACTTGACT CTGCCCAAAG AATCTTATAT |
| 6261 | ACAAGAAGAT GACATTTATG ATGATTCCCA AGAAGCTGAA GTTATCCAGT CTCTGCTGGA |
| 6421 | TGTTGTGGAT GAGGAAGCCC AGAATCTTTT AAACGAAAAT AATGCAGCAG GATACTCCTG |
| 6481 | TGGTCCAGGT ACATTAAAGA TGAATGGGAA GTTATCAGAA GAGAGAACAG AAGATACAGA |
| 6541 | CTGCGATGGT TCACCTTTAC CTGAGTATTT TACTGAGGCC ACCAAAATGA ATGGCTGTGA |
| 6601 | AGAATATTGT GAAGAAAAAG TAAAAAGTGA AAGCTTAATT CAGAAGCCAC AAGAAAAGAA |
| 6661 | GACTGATGAT GATGAAATAA CATGGGGAAA TGATGAGTTG CCAATAGAGA GAACAAACCA |
| 6721 | TGAAGATTCT GATAAAGATC ATTCCTTTCT GACAAACGAT GAGCTCGCTG TACTCCCTGT |
| 6781 | CGTCAAAGTG CTTCCCTCTG GTAAATACAC GGGTGCCAAC TTAAAATCAG TCATTCGAGT |
| 6841 | CCTGCGGGGT TTGCTAGATC AAGGAATTCC TTCTAAGGAG CTGGAGAATC TTCAAGAATT |
| 6801 | AAAACCTTTG GATCAGTGTC TAATTGGGCA AACTAAGGAA AACAGAAGGA AGAACAGATA |
| 6961 | TAAAAATATA CTTCCCTATG ATGCTACAAG AGTGCCTCTT GGAGATGAAG GTGGCTATAT |
| 7021 | CAATGCCAGC TTCATTAAGA TACCAGTTGG GAAAGAAGAG TTCGTTTACA TTGCCTGCCA |
| 7081 | AGGACCACTG CCTACAACTG TTGGAGACTT CTGGCAGATG ATTTGGGAGC AAAAATCCAC |
| 7141 | AGTGATAGCC ATGATGACTC AAGAAGTAGA AGGAGAAAAA ATCAAATGCC AGCGCTATTG |
| 7201 | GCCCAACATC CTAGGCAAAA CAACAATGGT CAGCAACAGA CTTCGACTGG CTCTTGTGAG |
| 7261 | AATGCAGCAG CTGAAGGGCT TTGTGGTGAG GGCAATGACC CTTGAAGATA TTCAGACCAG |
| 7221 | AGAGGTGCGC CATATTTCTC ATCTGAATTT CACTGCCTGG CCAGACCATG ATACACCTTC |
| 7381 | TCAACCAGAT GATCTGCTTA CTTTTATCTC CTACATGAGA CACATGCACA GATCAGGCCC |
| 7441 | AATCATTACG CACTGCAGTG CTGGCATTGG ACGTTCAGGG ACCCTGATTT GCATAGATGT |
| 7501 | GGTTCTGGGA TTAATCAGTC AGGATCTTGA TTTTGACATC TCTGATTTGG TGCGCTGCAT |
| 7561 | GAGACTACAA AGACACGGAA TGGTTCAGAC AGAGGATCAA TATATTTTCT GCTATCAAGT |
| 7621 | CATCCTTTAT GTCCTGACAC GTCTTCAAGC AGAAGAAGAG CAAAAACAGC AGCCTGAGGT |
| 7681 | TCTGAAGTGA CATGAAAAGA GCCTCTGGAT GCATTTCCAT TTCTCTCCTT AACCTCCAGC |
| 7741 | AGACTCCTGC TCTCTATCCA AAATAAGATC ACAGAGCAGC AAGTTCATAC AACATGCATG |
| 7801 | TTCTCCTCTA TCTTAGAGGG GTATTCTTCT TGAAAATAAA AAATATTGAA ATGCTGTATT |
| 7861 | TTTACAGCTA CTTTAACCTA TGATAATTAT TTACAAAATT TTAACACTAA CCAAACAATG |
| 7821 | CAGATCTTAG GGATGATTAA AGGCAGCATT TGATGATAGC AGACATTGTT ACAAGGACAT |
| 7981 | GGTGAGTCTA TTTTTAATGC ACCAATCTTG TTTATAGCAA AAATGTTTTC CAATATTTTA |
| 8041 | ATAAAGTAGT TATTTTATAG GGGATACTTG AAACCAGTAT TTAAGCTTTA AATGACAGTA |
| 8101 | ATATTGGCAT AGAAAAAAGT AGCAAATGTT TACTGTATCA ATTTCTAATG TTTACTATAT |
| 8161 | AGAATTTCCT GTAATATATT TATATACTTT TTCATGAAAA TGGAGTTATC AGTTATCTGT |
| 8221 | TTGTTACTGC ATCATCTGTT TGTAATCATT ATCTCACTTT GTAAATAAAA ACACACGTTA |
| 8281 | AAACATG |

GENEANK ID: NM_003326.1
VERSION NM_003336.1 GI:4507768
MSTPARRRLNRDFKRLQEDFPAGVSGAPSENNINVWNAVIFGPE
GTPFGDGTFKLTIEFTEEYPNKPPTVRFVSKMFHPNVYADGSICLDILQNRWSPTYDV
SSILTSIQSLLDEPNPNSPANSQAAQLYQENKREYEKRVSAIVEQSWRDC
GENBANK ID: S40706.1
VERSION S40706.1 GI:252001
MAAESLPFSSDTVSWELEAWYEDLQEVLSSDENCGTYVSPPGNE
SEESKIETTLDPASLAWLTEEEPEPAEVTSTSQSPHSPDSSQSSLAQEEEEEDQGRTR
KRKQSGHSPARAGKQRNKEKEQENERKVAQLAEENERLKQEIERLTREVEATRRALID
RMVNLHQA
GENBANK ID: M96995.1
VERSION M96995.1 GI:181975
MEAIAKYDEKATADDELSFKRGDILKVLNEECDQNNYKAELNGK
DGFIPKNYIEMKPHPWFFGKIPRAKAEENLSKQRHDGAFLIRESESAPGDFSLSVKFG
NDVQWFKVLRDGAGKYFLWVVKFNSLNELVDYHRSTSVSRNQQIFLRDIEQVPQQPTY
VQALFDFDPQEDGELGFRRGDFIHVMDNSDPNWWKGACNGQTGMFPRNYVTPVNRNV
GENBANK ID: M21758.1
VERSION M21758.1 GI:183664
MAEKPKLHYFNARGRNESTRWLLAAAGVEFEEKFIKSAEDLDKL
RNDGYLNEQQVPNVEIDGMKLVQTRAILNYIASKYNLYGKDIKERALIDMYIEGIADL
GENILLLPVCPPEEKDAKLALIKEKIKNRYFPAEEKVLKSHGQDYLVGNKLSRADIHL
VELLYYVEELDSSLISSEPLLKALKTRISNLPTVKKFLQPGSPRKPPNDEKSLEEARK
IFRF
GENBANK ID: U32944.1
VERSION U32944.1 GI:1209060
MCDRKAVIKNADMSEENQQDSVECATQALEKYNIEKDIAARIKK
EFDKKYNPTWHCIVGRNFGSYVPMETKHFIYFYLGQVAILLFKSG
GENBANK ID: NM_021141.2
VERSION NM_021141.2 GI:12406650
MVRSGNKAAVVLCNDVGFTMSNSIPGIESPFEQAKKVITMFVQR
QVFAENKDEIALVLFGTDGTDNPLSGGDQYQNITVHRRLMLPDFDLLEDIESKIQPGS
QQADFLDALIVSMDVIQHETIGKKFEKRHIEIFTDLSSRFSKSQLDIIIHSLKKCDIS
LQFFLPFSLGKEDGSGDRGDGPFRLGGHGPSFPLKGITEQQKEGLEIVKMVMISLEGE
DGLDEIYSFSESLRKLCVFKKIERHSIHWPCRLTIGSNLSIRIAAYKSILQERVKKTW
TVVDAKTLKKEDIQKETVYCLNDDDETEVLKEDIIQGFRYQSDIVPFSKVDEEQMKYK
SEGKCFSVLGFCKSSQVQRRFFMGNQVLKVFAARDDEAAAVALSSLINALDDLDMVAI
VRYAYDKRANPQVGVAFPHIKMNYECLVYVQLPFNEDLRQYNFSSLKNSKKYAPTEAQ
LNAVDALIDSNSLAKKDEKTDTLEDLFPTTKIPNPRFQRLRQCLLMRALHPREPLPPI
QQHIWNNLNPPAEVTTKSQIPLSKIKTLEPLIEAKKKDQVTAQEIFQDNMEDGPTAKK
LKTEQGGAMESVSSLAEQSVTSVGSVNPAENFRVLVKQKKASEEEASNQLINHIEQFL
DTNETPYFNKSIDCIRAFREEAIKFSEEQRFNNFLKALQEKVEIKQLNHFNEIVVQDG
ITLITKEEASGSSVTAEEAKKFLAPKDKPSGDTAAVFEEGGDVDDLLDMI
GENBANK ID: NM_005053.1
VERSION NM_005053.1 GI:4826963
MAVTITLKTLQQQTFKIRNEPDETVKVLKEKIEAEKGRDAFPVA
DQKLIYAGKILSDDVPIRDYRIDEKNFVVVNVTKTKAGQGTSAPPEASPTAAPESSTS
FPPAPTSGMSHPPPAAREDKSPSEESAPTTSPESVSGSVPSSGSSGREEDAASTLVTG
SEYETNLTEIMSMGYERERVVAALRASYNNPHRAVEYLLTGIPGSPEPEMGSVQESQV
SEQPATEAAGENPLEFLRDQPQEQNNRQVIQQNPALLPALLQQLGQENPQLLQQISRH
QEQFIQMLNEPPGELADISDVEGEVGAIGEEAPQNNYIQVTPQEKEAIERLKALGEPE
SLVIQAYFACEKNENLAANFLLSQNFDDE
GENBANK ID: Z23115.1
VERSION Z23115.1 GI:510900
MSQSNEELVVDFLSYKLSQEKGYSWSQFSDVEENETEAPEGTESE
METPSAINGNPSWNLADSPAVNGATAHSSSLDAREVIPMAAVKQALREAGDEFELRYR
RAFSDLTSQLHITPGTAYQSFEQVVNELFRDGVNWGRIVAFWSEGGALCVESVDKEMQ
VLVSRIAAWMATYLNDHLETWIQENGGWDTFVELYGNNAAAESRKGQERFNRWFLTGN
TVAGVVLLGSLFSRK
GENBANK ID: AB020979.1
VERSION AB02D979.1 GI:6518501
MDEADRRLLRRCRLRLVEELQVDQLWDALLSSELFRPHNIEDIQ
RAGSGSRRDQARQLIIDLETRGSQALPLFISCLEDTGQDMLASFLETNRQAAKLSKPT
LENLTPVVLRPEIRKPEVLRPETPRPVDIGSGGFGDVEQKDHGFEVASTSTEDESPGS
NPEPDATPFQEGLRTFDQLDAISSLPTPSDIFVSYSTFPGFVSWRDPKSGSWYVETLD
DIFEQWAHSEDLQSLLLRVANAVSVKGIYKQNPGCFNFLRKKLFFKTS
GENBANK ID: U21092.1
VERSION U21092.1 GI:726087
MESSKKNDSPGALQTNPPLKLHTDRSAGTPVFVPEQGGYKEKFV
KTVEDKYKCEKCHLVLCSPKQTECGHRTCESCMAALLSSSSPKCTACQESIVKDKVFK
DNCCKREILALQIYCRNESRGCAEQLTLGHLLVHLKNDCHFEELPCVRPDCKEKVLRK
DLRDHVEKACKYREATCSNCKSQVPMIALQKHEDTDCPCVVVSCPHKCSVQTLLRSEL
SAHLSECVNAPSTCSFKRYGCVFQGTNQQIKAHEASSAVQHVNLLKEWSNSLEKKVSL
LQNESVEKNKSIQSLHNQICSFEIEIERQKEMLRNNESKILHLQRVIDSQAEKLKELD
KEIRPFRQNMEEADSMKSSVESLQNRVTELESVDKSAGQVARNTGLLESQLSRHDQML
SVHDIRLADMDLRFQVLETASYNGVLIWKIRDYKRRKQEAVMGKTLSLYSQPFYTGYF
GYKMCARVYLNGDGMGKGTHLSLFFVIMRGEYDALLPWPFKQKVTLMLMDQGSSRRHL
GDAFKPDPNSSSFKKPTGEMNIASGCPVFVAQTVLENGTYIKDDTIFIKVIVDTSDLP
DP
GENBANK ID: NM_001459.1
VERSION NM_001459.1 GI:4503750
MTVLAPAWSPTTYLLLLLLLSSGLSGTQDCSFQHSPISSDFAVK
IRELSDYLLQDYPVTVASNLQDEELCGALWRLVLAQRWMERLKTVAGSKMQGLLERVN
TEIHFVTKCAFQPPPSCLRFVQTNISRLLQETSEQLVALKPWITRQNFSRCLELQCQP
DSSTLPPPNSPRPLEATAPTAPQPPLLLLLLLPVGLLLLAAAWCLHWQRTRRRTPRPG
EQVPPYPSPQDLLLVEH
GENBANK ID: X57500.1
VERSION M36089.1 GI:340396
MPEIRLRHVVSCSSQDSTHCAENLLKADTYRKWRAAKAGEKTIS
VVLQLEKEEQIHSVDIGNDGSAFVEVLVGSSAG0AGEQDYEVLLVTSSFMSPSESRSG
SNPNRVRMFGPDKLVRAAAEKRWDRVKIVCSQPYSKDSPFGLSFVRFHSPPDKDEAEA
PSQKVTVTKLGQFRVKEEDESANSLRPGALFFSRINKTSPYTASDPAGPSYAAATLQA
SSAASSASPVSRAIGSTSKPQESPKGKRKLDLNQEEKKTPSKPPAQLSPSVPKRPKLP
APTRTPATAPVPARAQGAVTGKPRGEGTEPRRPRAGPEELGKILQGVVVVLSGFQNPF
RSELRDKALELGAKYRPDWTRDSTHLICAFANTPKYSQVLGLGGRIVRKEWVLDCHRM
RRRLPSRRYLMAGPGSSSEEDEASHSGGSGDEAPKLPQKQPQTKTKPTQAAGPSSPQK
PPTPEETKAASPVLQEDIDIEGVQSEGQDNGAEDSGDTEDELRRVAEQKEHRLPPGQE
ENGEDPYA0STDENTDSEEHQEPPDLPVPELPDFFQGKHFFLYGEFPGDERRKLIRYV
TAFNGELEDYMSDRVQFVITAQEWDPSFEEALMDNPSLAFVRPRWIYSCNEKQKLLPH
QLYGVVPQA
GENBANK ID: BAA02962.1
DEFINITION HUMAN MRNA FOR RECA-LIKE PROTEIN HSRAD51, COMPLETE CDS.
VERSION 013804.1 GI:397826
CDS 212..1231
/CODON_START=1

| | |
|---|---|
| 1 | GAATTCCGGT AAGGAGAGTG CGGCCCTTCC CGAGGCGTGC AGCTGGGAAC TGCAACTCAT |
| 61 | CTGGGTTGTG CGCAGAAGGC TGGGGCAAGC GAGTAGAGAA GTGCACCGTA AGCCAGCGGG |
| 121 | CTTGGGCGCC GTCCGGCCGG GTCGCGTGCA GCCCCGCGGG GTGAAGTCGG AGCGCGGGGC |
| 181 | CTGCTGGAGA GAGGAGCGCT GCGACCGAGT AATGGCAATG CAGATGCAGC TTGAAGCGAA |
| 241 | TGCAGATACT TCAGTCGAAG AAGAAAGCTT TGGCCCACAA CCCATTTGAC GGTTAGAGCA |
| 301 | GTGTGGCATA AATGCCAACG ATGTGAAGAA ATTCGAAGAA GCTGGATTCC ATACTGTGGA |
| 361 | GGCTGTTGCC TATGCGCCAA ACAAGCAGCT AATAAATATT AAGGGAATTA GTGAAGCCAA |
| 421 | AGCTGATAAA ATTCTGGCTG AGGCAGCTAA ATTAGTTCCA ATGGGTTTCA CCACTGCAAC |
| 481 | TGAAPTCCAC CAAACGCGGT CAGAGATCAT ACAGATTACT ACTGGCTCCA AAGAGCTTGA |
| 541 | CAAACTACTT CAAGGTGGAA TTGAGACTGG ATCTATCACA GAAATGTTTG GAGAATTCCG |
| 601 | AACTGGGAAG ACCCAGATCT GTCATACGCT AGCTGTCACC TGCCAGCTTC CCATTGACCG |
| 661 | GGGTGGAGGT GAAGGAAACG CCATGTACAT TGACACTGAG GGTACCPTTA GGCCAGAACG |
| 721 | GCTGCTGGCA GTGGCTGAGA GGTATGCTCT CTCTGGCAGT GATGTCCTGG ATAATGTAGC |
| 781 | ATATGCTCGA GCGTTCAACA CAGACCACCA GACCCAGCTC CTTTATCAAG CATCAGCCAT |
| 841 | GATGGTAGAA TCTAGGTATG CACTGCTTAT TGTAGACAGT GCCACCGCCC TTTACAGAAC |
| 901 | AGACTACTGG GGTCGAGGTG AGCTTTCAGC CAGGCAGATG CACTTGGCCA GGTTTCTGCG |
| 961 | GATCCTTCTG CGACTCGCTG ATGAGTTTGG TGTAGCAGTG GTAATCACTA ATCAGGTGGT |
| 1021 | AGCTCAAGTG GATGGAGCAG CGATGTTTGC TGCTGATCCC AAAAAACCTA TTGGAGGAAA |
| 1081 | TATCATCGCC CATGCATCAA CAACCAGATT GTATCTGAGG AAAGGAAGAG GGGAAACCAG |
| 1141 | AATCTGCCAA ATCIACGACT CTCCCTGTCT TCCTGAAGCT GAAGCTATGT TCGCCATTAA |
| 1201 | ICCAGAIGGA GTGGGAGATG CCAAAGACTG AATCATTGGG TTTTTCCTCT GTTAAAAACC |
| 1261 | TTAAGTGCTG CAGCCTAATG AGAGTGCACT GCTCCCTGGG GTTCTCTACA GGCCTCTTCC |
| 1321 | TGTTGTGACT GCCAGGATAA AGCTTCCGGG AAAACAGCTA TTATATCAGC TTTTCTGATG |
| 1381 | GTATAAACAG GAGACAGGTC AGTAGTCACA AACTGATCTA AAATGGTTTA TTCCTTCTGT |
| 1441 | AGTGTATTAA TCTCTGTGTG TTIICTTTGG TTTTGGAGGA GGGTATGAAG TATCTTTGAC |
| 1501 | ATGGTGCCTT AGGAATGACT TGGGTTTAAC AAGCTGTCTA CTGGACAATC TTATGTTTCC |
| 1561 | AAGAGAACTA AAGCTGGAGA GACCTGACCC TTCTCTCACT TCTAAATTAA TGGTAAAATA |
| 1621 | AAAGTCCTCA GCTATGTAGC AAAGG |

GENBANK ID: B56529
AGGAGGTGCAGGAGAACAGAAGTGTGCCCTGTGCTCTTCTGAGCAGAGAAGCACCATGAG
CTGGGGCAGGCAAACCCCACTGGGGCTGGCATGGCTCGCTGGGGCTGGCACGTGGAGGGA
AGTGCTGCCTCCCCAGGCCTCTGCTTTAATGATCAGCTTAGTCACTGGTGTGACTGTGCC
CTGGGCTATTGCCTGAGGTGAAACCTTTACCTGCTCCCTGGTCTATCTTGGTAGAATTGA
TCTATTTCAAAGGTATACAGCTAAGCAGATTCTTATTTCTGAGAATACCACCTGTGTGGC
ACCTCCTTTCCAGCTCCTCAGGGAATGTGAGACATGTGAGGAGCTGCCACACTCCTTGCC
AGTAGTCACAGGAAAGGGTGGTTAACAAGTTAAAGTAACCAAGAGGAATATGTGTGTTGA
GTCAGCTGATGGCGTTTGCAAGTGGAATGTCCTTCTTACC
GENBANK ID: CAA59230.1
DEFINITION H. SAPIENS MRNA FOR DNA LIGASE III.
VERSION X84740.1 GI:860962
CDS 334..3102
/CODON_START=1

| | |
|---|---|
| 1 | CCACGCGTCC GGCAGCCTGT ATGAGCAAGT GCCGAGGCCT ACGGTGAGCG CCGGAGCCGG |
| 61 | AGAGGCAGCT ATATGTCTTT GGCTTTCAAG ATCTTCTTTC CACAAACCCT CCGTGCACTC |
| 121 | AGCCGAAAAG AACTGTGCCT ATTCCGAAAA CATCACTGGC GTGATGTAAG ACAATTCAGC |
| 181 | CAGTGGTCAG AAACAGATCT GCTTCATGGA CATCCCCTCT TCCTGAGAAG AAAGCCTGTT |
| 241 | CTATCATTCC AGGGAAGCCA TCTAAGATCA CGTGCCACCT ACCTTGTTTT CTTGCCAGGG |
| 301 | TTGCATGTGG GACTCTGCAG TGGCCCCTGT GAGATGGCTG AGCAACGGTT CTGTGTGGAC |
| 361 | TATGCCAAGC GTGGCACAGC TGGCTGCAAA AAATGCAAGG AAAAGATTGT GAAGGGCGTA |
| 421 | TGCCGAATTG GCAAAGTGGT GCCCAATCCC TTCTCAGAGT CTGGGGGTGA TATGAAAGAG |
| 481 | TGGTACCACA TTAAATGCAT GTTTGAGAAA CTAGAGCGGG CCCGGGCCAC CACAAAAAAA |
| 541 | ATCGAGGACC TCACAGAGCT GGAAGGCTGG GAAGAGCTGG AAGATAATGA GAAGGAACAG |
| 601 | ATAACCCAGC ACATTGCAGA TCTGTCTTCT AAGGCAGCAG GTACACCAAA GAAGAAAGCT |
| 661 | GTTGTCCAGG CTAAGTTGAC AACCACTGGC CAGGTGACTT CTCCAGTGAA AGGCGCCTCA |
| 721 | TTTGTCACCA GTACCAATCC CCGGAAATTT TCTGGCTTTT CAGCCAAGCC CAACAACTCT |
| 781 | GGGGAAGCCC CCTCGAGCCC CACCCCTAAG AGAAGTCTGT GTTCAAGCAA ATGTGACCCC |
| 841 | AGGCATAAGG ACTGTCTGCT ACGGGAGTTT CGAAAGTTAT GCGCCATGGT GGCCGATAAT |
| 901 | CCTAGCTACA ACACGAAGAC CCAGATCATC CAGGACTTCC TTCGGAAAGG CTCAGCAGGA |
| 961 | GATGGTTTCC ACGGTGATGT GTACCTAACA GTGAAGCTGC TGCTGCCAGG AGTCATTAAG |
| 1021 | ACTGTTTACA ACTTGAACGA TAAGCAGATT GTGAAGCTTT TCAGTCGCAT TTTTAACTGC |
| 1081 | AACCCAGATG ATATGGCACG GGACCTAGAG CAGGGTGACG TGTCAGAGAC AATCAGAGTC |
| 1141 | TTCTTTGAGC AGAGCAAGTC TTTCCCCCCA GCTGCCAAGA GCCTCCTTAC CATCCAGGAA |
| 1201 | GTGGATGAGT TCCTTCTGCG GCTGTCCAAG CTCACCAAGG AGGATGACCA GCAACAGGCC |
| 1261 | CTACAGGACA TTGCCTCCAG GTGTACAGCC AATGACCTTA AATGCATCAT CAGGTTGATC |
| 1321 | AAACATCATC TGAAGATGAA CTCAGGTGCA AAACATGTGT TAGACGCCGT TGACCCCAAT |
| 1381 | GCCTATGAAG CCTTCAAAGC CTCGCCCAAC CTGCAGGATG TGGTGGAGCG GGTCCTTCAC |
| 1441 | AACGCGCAGG AGGTGGAGAA GGAGCCGGGC CAGAGACCAG CTCTGAGCGT CCAGGCCTCG |
| 1501 | CTGATGACAC CTGTGCAGCC CATGTTGGCG GAGGCCTGCA AGTCCGTTGA GTATGCAATG |
| 1561 | AAGAAATGTC CCAATGGCAT GTTCTCTGAG ATCAAGTACG ATGGAGAGCG AGTCCAGGTG |
| 1621 | CATAAGAATG GAGACCACTT CAGCTACTTC AGCCGCAGTC TCAAGCCCGT CCTTCCTCAC |
| 1681 | AAGGTGGCCC ACTTTAAGGA CTACATTCCC CAGGCTTPTC CTGGGGGCCA CAGCATGATC |
| 1741 | TTGGATTCTG AAGTGCTTCT GATTGACAAC AAGACAGGCA AACCACTGCC CTTTGGGACT |
| 1801 | CTGGGAGTAC ACAAGAAAGC AGCCTTCCAG GATGCTAATG TCTGCCTGTT TGTTTTTGAT |
| 1861 | TGTATCTACT TTAATGATGT CAGCTTGATG GACAGACCTC TGTGTGAGCG GCGGAAGTTT |
| 1921 | CTTCATGACA ACATGGTTGA AATTCCAAAC CGGATCATGT TCTCAGAAAT GAAGCGAGTC |
| 1981 | ACAAAAGCTT TGGACTTGGC TGACATGATA ACCCGGGTGA TCCAGGAGGG ATTGGAGGGG |
| 2041 | CTGGTGCTGA AGGATGTGAA GGGTACATAT GAGGCTGGGA AGCGGCACTG GCTGAAAGTG |
| 2101 | AAGAAAGACT ATTTGAACGA GGGGGCCATG GCCGACACAG CTGACCTGGT GGTCCTTGGA |
| 2161 | GCCTTCTATG GGCAAGGGAG CAAAGGCGGC ATGATGTCAA TCTTCCTCAT GGGCTGCTAC |
| 2221 | GACCCTGGCA GCCAGAAGTG GTGCACAGTC ACCAAGTGTG CAGGAGGCCA TGATGATGCC |
| 2281 | ACGCTTGCCC GCCTGCAGAA TGAACTAGAC ATGGTGAAGA TCAGCAAGGA CCCCAGCAAA |
| 2341 | ATACCCAGCT GGTTGAAGGT CAACAAGATC TACTATGCTG ACTTCATCGT CCCAGACCCA |
| 2401 | AAGAAAGCTG CCGTGTGGGA GATCACAGGG GCTGAATTCT CCAAATCGGA GGCTCATACA |
| 2461 | GCTGACGGGA TCTCCATCCG ATTCCCTCGC TGCACCCGAA TCCGAGATGA TAAGGACTGG |
| 2521 | AAATCTGCCA CTAACCTTCC CCAACTCAAG GAACTGTACC AGTTGTCCAA GGAGAAGGCA |
| 2581 | GACTTCACTG TAGTGGCTGG AGATGAGGGG AGCTCCACTA CAGGGGGTAG CAGTGAAGAG |
| 2641 | AATAAGGGTC CCTCAGGGTC TGCTGTGTCC CGCAAGGCCC CCAGCAAGCC CTCAGCCAGT |
| 2701 | ACCAAGAAAG CAGAAGGGAA GCTGAGTAAC TCCAACAGCA AAGATGGCAA CATGCAGACT |
| 2761 | GCAAAGCCTT CCGCTATGAA GGTGGGGGAG AAGCTGGCCA CAAAGTCTTC TCCAGTGAAA |
| 2821 | GTAGGGGAGA AGCGGAAAGC TGCTGATGAG ACGCTGTGCC AAACAAAGGT ATTGCTGGAC |
| 2881 | ATCTTCACTG GGGTGCGGCT TTACTTGCCA CCCTCCACAC CAGACTTCAG CCGTCTCAGA |
| 2941 | CGCTACTTTG TGGCATTCGA CGGGGACCTG GTACAGGAAT TTGATATGAC TTCAGCCACG |
| 3001 | CACGTGCTGG GTAGCAGGGA CAAGAACCCT GCGGCCCAGC AGGTCTCCCC AGAGTGGATT |
| 3061 | TGGGCATGTA TCCGGAAACG GAGACTGGTA GCTCCCTGCT AGGTTTGCTG TCTTCCCTCT |
| 3121 | CCCTCAGGCC ATACTCTCCT TTACCATACT ATTGGACTGG ACTCAGGCTG GAGGCAGATA |
| 3181 | GACACAGTAT AGGGGGAATG GGCTTGCTTC TCCCAAACCC ACCAGTTCTC CACTGTCTCT |
| 3241 | TCTGGACCAG GAATTAGTTG CTGTGGGTGC CACAGCTGAA GTCAGTTTGT CTTGCTGGTT |
| 3301 | TAAATAGATC TTTCAGAGCT GGGTGCTGGG TTTGCCATCT TTTTGTTTTC TTTGAAAAGC |
| 3361 | AGCTTAGTTA CCCTTTTTAT AAATAAAATA TCTTGCAGTT AAAAAAAAAA AAAAAAAAAA |
| 3421 | AA |

GENBANK ID: D26155.1
VERSION D26155.1 GI:505086
MSTPTDPGAMPHPGPSPGPGPSPGPILGFSPGPGPSPGSVESMM
GESPGPPSVSHPMPTNGSTDFPQEGMHQMHKPIDGIHDKGIVEDTHCGSNKGTGMRPP
HPGNGPPQSPMDQHSQGMSPHPSPLGAPEHVSSPMSGGGPTPPQYSPPSQPGALIPGD
PQAMSQPNRGPSPFSPVQLHQLRAQILAYKMLARGQFLPETLQLAVQGKRTLPGLQQQ
QQQQQGQQQQQQQQQQQQQPQQQPQQQPQTQQQQQPALVNYNRPSGPGPELSGPSTPQ
KLPVPAPGGRPSPAPPAAAQPFAAAVPGPSVPQFAPGQPSFVLQLQQKQSRISPIQKP
QGLDPVEILQEREYRLQARIAHRIQELENLFGSLPPDLRTKATVELKALRLLNFQRQL
REEVVACNRRDTTLETALNSKAYKRSKRQTLREARMTEKLEKQQKIEQERKRRQKHQE
YLNSILQHAKDFKEYNRSVAGKIQKLSKAVATWHANTEREQKKETERIEKERMRRLMA
EDEESYRKLIDQKKDRRLAYLLQQTGEYVANLTNLVWEHKQAQAAKEKKKRRRRKKKA
EENAEGGESALGPDGEPIDSSSQNSDLPVKVTNTETGKVLFGPEAPKASQLDANLEMN
PGYEVAPRSDSSESDSDYEEEDEEEESSRQETEEKILLDPNSEEVSEKDAKQIIETAK
QDVDDEYSMQYSARGSQSYYTVAHAISERVEKQSALLINGTLKHYQLQGLEWMVSLYN
NNLNGILADEMGLGKTIQTIALITYLMEHKRLNGPYLIIVFLSTLSNNTYEFDKWAPS
VVKISYKGTPAMRRSLVPQLRSGKFNVLLTTYEYIIKDKHILAKIRWKYMIVDEGNRM
KNHHCKLTQVLNTEYVAPRRILLTGTPLQNKLPELWALLNELLPTIFKSCSTFEQWFN
APFAMTGERVDLNEEETILIIRRLEKVLRPFLLRRLKKEVESQLPEKVEYVIKCDMSA
LQKILYRHMQAKGILLTDGSEKDKKGKGGAKTLMNTIMQLRKICNHPYNFQHIESSFA
EHLGYSNGVINGAELYRASGKFELLDRILPKLRATNHRVLLFCQMTSLNTIMEDYFAF
RNFLYLRLDGTTKSEDRAALLKKFNEPGSQYFIFLLSTRAGGLGLNLQAAHTVVIFDS
DWNPHQDLQAQDRARRIGQQNEVRVLRLCTVNSVEEKILAAAKYKLNV0QKVIQAGMF
DQKSSSHERRAFLQAILEHEEENEEEDEVPDDETLNQMIARREEEFDLFMRMDMDRRR
EDARNFKRKPRLNESDELPSWIIKDDAEVERLTCEEEEEKIFGRGSRQRRDVDYSDAL
TEKQWLRAIEDGNLEEMEEEVRLKKRKRRRNVDKDFAKEDVEKAKHRRGRPPAEKLSP
NPPKLTKQMNAIIDTVINYKDSSGRQLSEVFIQLPSRKELPEYYELIRKPVDFKKIKE
RIRNHRYRSLGDLEKDVMLLCHNAQTFNLEGSQIYEDSIVLQSVFKSARQKIAKEEES
EDESNEEEEEEDEEESESEAKSVKKIKLNKKDDKCRDKGKGKKRPNRGKAKFVVSDF
DSDEEQDEREQSEGSGTDDE
GENBANK ID: M62829J
VERSION M62829.1 GI:182262
MAAAKAEMQLMSPLQISDPFGSFPHSPTMDNYPKLEEMMLLSNG
APQFLGAAGAFBGSGSNSSSSSSGGGGGGGGGSNSSSSSSTENPQADTGEQPYEHLTA
ESFFDISLNNEKVLVETSYFSQTTRLPFITYTGRFSLEPAPNSGNTLWPEFLFSLVSG
LVSNTNPPASSSSAPSFAASSASASQSPPLSCAVBSNDSSPIYSAAFTFPTPNTDIFP
EPQSQAFPGSAGTALQYPPPAYPAAKGGFQVFNIPDYLFPQQQGDLGLCTPDQKPFQG
LESRTQQPSLTPLSTIKAFATQSGSQDLKALNTSYQSQLIKPSRMRKYFNRPSKTPPH
ERPYACPVESCDRRFSRSDELTRHIRIHTGQKPFQCRICMRNFSRSDHLTTHIRTHTG
EKPFACDICGRKFARSDERKRETKIHLRQKDKKADKSVVASRATSSLSSYFSPVATSY
PSPVTTSYPSPATTSYPSPVPTSFSSPGSSTYPSPVHSGFPSPSVATTYSSVPPAFPA
QVSSFPSSAVTNSFSASTGLSDNTATFSFRTIEIC
GENBANK ID: U10421.1
VERSION U10421.1 GI:500756
MDNARMNSFLEYPILSSGGSGTCSARAYFSDBRITTFQSCAVSA
NSCGGDDRFLVGRGVQIGSPHHHHHHHHHHPQPATYQTSGNLGVSYSHESCQPSYGSQ
NFSAPYSPYALNQEADVSGGYPQCAPAVYSGNLSSPMVQHHHHHQGYAGGAVGSPQYI
HHSYGQEHQSLALATYNNSLSPLHASHQEACRSPASETSSPAQTFDWNKVKRNFPKTG
KVGEYGYLGQFNAVRTNFTTKQLTELEKEFHFNKYLTRARRVEIAASLQLNETQVKIW
FQNRRMKQKKREKEGLLPISPATPPGNDEKAEESSEKSSSSPCVPSPGSSTSDTLTTS
H
GENBANK ID: U08015.1
VERSION U08015.1 GI:500631
MPSTSFPVPSKFPLGPAAAVFGRGETLGPAPRAGGTMKSAEEEH
YGYASSNVSPALPLPTAHSTLPAPCHNLQTSTPGIIPPADHPSGYGAALDGGPAGYFL
SSGHTRPDGAFALESPRIEITSCLGLYHNNNQFFHDVEVEDVLPSSKRSPSTATLSLF
SLEAYRDPSCLSPASSLSSRSCNSEASSYESNYSYPYASPQTSPWQSPCVSPKTTDPE
EGFPRGLGACTLLGSPQHSFSTSPRASVTEESWLGARSSRPASPCNKRKYSLNGRQPP
YSPHHSPTPSPHGSPRVSVTDDSWLGNTTQYTSSAIVAAINALTTDSSLDLGDGVPVK
SRKTTLEQPPSVALKVEPVGEDLGSPPPPADFAPEDYSSFQEIRKGGFCDQYLAVPQN
PYQWAKPKPLSPTSYNSPTLPALDWQLPSHSGPYELRIEVQPKSHHRAHYETEGSRGA
VKASAGGHPIVQLHGYLENEPLMLQLFIGTADDRLLRPHAFYQVHRITGKTVSTTSHE
AILSNTKVLEIPLLPENSMRAVIDCAGILKLRNSDIELRKGETDICRKNTRVRLVFRV
HVPQPSGRTLSLQVASNPIECSQRSAQELPLVEKQSTDSYPVVGGKKMVLSGHNFLQD
SKVIFVEKAPDGHHVWENEAKTDRDLCKPNSLVVEIPPFRNQRITSPVHVSFYVCNGK
RKRSQYQRFTYLPANGNAIFLTVSREHERVGCFF
GENBANK ID: U08191.1
VERSION U08191.1 GI:476273
MTRVNAGRKGSLAALYDLAVLKKKVKEKEEKKKKKIRIIKSEAE
DLAEPLSSTEGVAPLSQAPSPLAIPAIKEEPLEDLKPCLGINEISSSFFSLLLEILLL
ESQASLFNLEERVLDWQSSPASSLNSWFSAAPNWAELVLPALQYLAGESRAVPSSFSP
FVEFKEKTQQWKLLGQSQDNEKELAALFQLNLETKDQAFCKQENEGSSDATTPVPRVR
TDYVVRPSTGEEKRVFQEQERYRYSQPHKAFTFRMHGFESVVGPVKGVFDKETSLNKA
REHSLLRSDRFAYVTILSLVRDAAARLPNGEGTRAEICELLKDSQFLAFDVTSTQVNT
VVSGALDRLHYEKDPCVKYDIGRKLWIYLER0RSEEEFERIHQAQAAAAKARKALQQK
PKPPSKVKSSSKESSIKVLSSGPSEQSQMSLSDSSNPFTPVTPVTPTTPALPAIPISP
PPVSAVNKSGFSTVSEPAKSSSGVLLVSSFTNPHLGTMLSPASSQTAPSSQAAARVVS
HSGSAGLSQVRVVAQPSLPAVPQQSGGPAQTLPQMPAGPQIRVFATATQTKVVPQTVM
ATVPVKAQTTAATVQRPGPGQTGLTVTSLPATASPVSKPATSSPGTSAPSASTAAVIQ
NVTGQNIIKQVAITGQLGVKPQTGNSIPLTATNFRIQGKDVLRLFPSSITTDAKGQTV
LRITPDNMATLAKSQVTTVKLTQDLFGTGGNTTGKGISATLHVTSNFVNAADSPAKAS
SASAPSSTPTGTTVVKVTPDLKPTEASSSAFRLNPALGVSVADQKGKSTVASSEARPA
ATIRIVQGLGVNPPKAGQTITVATHAKQGASVASGSGTVHTSAVSLPSNNAAVSKTVA
VASGAASTPISISTGAPTVRQVPVSTTVVSTSQACKLPTRITVPLSVISQPMKGKSVV
TAPIIKGNLGANLSGLGRNIILTTMPAGTKLIAGNKPVSFLTAQQLQQLQQQGQATQV
RIQTVPASISNREQLLAPPKQSPLLL
GENBANK ID: M55654
VERSION M55654.1 GI:339491
MDQNNSLPPYAQGLASPQGAMTPGIPIFSPMMPYGTGLTPQPIQ
NTNSLSILEEQQRQQQQQQQQQQQQQQQQQQQQQQQQQQQQQQQQQQQQQQAVAAAAV
QQSTSQQATQGTSGQAPQLFHSQILTTAPLPGTTPLYPSPMTPNTPITPATPASESSG
IVPQLQNIVSTVNLGCKLDLKTIALRARNAEYNPKRFAAVINRIREPRTTALIFSSGK
MVCTGAKSEEQSRLAARKYARVVQKLGEPAKELDFKIQNNVGSCDVKFPIRLEGLVLT
HQQFSSYEPELFPGLIYRMIKPRIVLLIFVSQKVVLTGAKVRAEIYEAFENIYPILKG
FRKTT
GENBANK ID: NM_005568.1
VERSION NM_005568.1 GI:5031866
MVHCAGCKRPILDRFLLNVLDRAWHVKCVQCCECKCNLTEKCFS
REGKLYCKNDFFRCFGTKCAGCRQGISPSDLVRRARSKVFHLNCFTCNNCNKQLSTGE
ELYIIDENKFVCKEDYLSNSSVAKENSLRSATTGSDPSLSPDSQDPSQDDAKDSESAN
VSDKEAGSNEN0DQNLGAERRGPGTTIKAKQLETLKAAFAATPKPTREIREQLAQETG
LNMRVIQVNFQNRRSKERRMKQLSALAGHAFERSPRRMRPLVDRLEPGELIPNGFFSF
YGDYQSEYYGPGGNYDFFPQGPPSSQAQTPVDLPFVPSSGPSGTPLGGLEHPLPGHHP
SSEAQRFTDILAHPPGDSPSPEPSLPGPLHSNSAEVFGPSPPFSSLSVNGGASYGNHL
SHPPEMNEAAVW
GENBANK ID: X69111.1
VERSION X69111.1 GI:32294
MKALSPVRGCYEAVCCLSERSLAIARGRGKGPAAEEPLSLLDDM
NHCYSRLRELVPGVPRGTQLSQVEILQRVIDYILDLQVVLAEPAPGPPDGPHLPIQTA
ELAPELVISNDKRSFCH
GENBANK ID: NP_000507.1
VERSION NP_000507.1 GI:4504047

| | |
|---|---|
| 1 | MGCLGNSETE DQRNEEKAQR EANKKIEKQL QKDKQVYRAT HRLLLLGAGE SGKSTIVKQM |
| 61 | RILHVNGFNG EGGEEDPQAA RSNSDGEKAT KVQDIKNNLK EAIETIVAAM SNLVPPVELA |
| 121 | NPENQFRVDY ILSVMNVPDF DWPPEFYEHA KALWEDEGVR ACYERSNEYQ LIDCAQYFLD |
| 181 | KIDVIEQADY VPSDQDLLRC RVLTSGIFET KFQVDKVNFH NFDVGGQRDE RRKWIQCFND |
| 241 | VTAIIFVVAS SSYNMVIRED NQTNRLQEAL NLFKSIWNNR WLRTISVILF LNKQDLLAEK |
| 301 | VLAGKSKIED YFPEFARYTT PEDATPEPGE DPRVTRAKYF IRDEFLEIST ASGDGRHYCY |
| 361 | PHFTCAVDTE NIRRVFNDCR DIIQRMHLRQ YELL |

GENBANK ID: AAA40889.1
VERSION AAA40889.1 GI:203357

| | |
|---|---|
| 1 | MEQYTANSNS STEQIVVQAG QIQQQQQGGV TAVQLQTEAQ VASASGQGVG TLQVVQGQPL |
| 61 | NVQVSGGQLI TSTGQPINVQ AVPGGQGQTI MQVPVSGTQG LQQIQLVPPG QIQIQGGQAV |
| 121 | QVQGQQGQTQ QIIIQQPQTA VTAGQTQTQQ QIAVQGQQVA QTAEGQTIVY QPVNADGTIL |
| 181 | QQGMITIPAA SLAGAQIVQT GANTNTTSSG QGTVTVTLPV AGNVVNSGGM VMMVPGAGSV |
| 241 | PAIQRIPLPG AEMLEEEPLY VNAKQYHRIL KRRQARAKLE AEGKIPKERR KYLHESRHRH |
| 301 | AMARKRGEGG RFFSPKEKDS PHMQDPNQAD EEANTQIIRV S |

GENBANK ID: B53771
VERSION B53771 GI:2136296

| | |
|---|---|
| 1 | MAWALKLPLA DEVIESGLVQ DFDASLSGIG QELGAGAYSM SDVLALPIFK QEESSLPPDN |
| 61 | ENKILPFQYV LCAATSPAVK LHDETLTYLN QGQSYEIRML DNRELGELPE INGKLVKSIF |
| 121 | RVVFHDRRLQ YTEHQQLEGW RWNRPGDRIL DIDIPMSVGI IDPRANPTQL NTVEFLWDPA |
| 181 | KRTSVFIQVH CISTEFTMRK HGGEKGVPFR VQIDTFEENE NGEYTEHLHS ASCQIKVFKP |
| 241 | KGADRKQKTD REKNEKRTPH EKEKYQPSYE TTILTECSPN PEITYVNNSP SPGFNSSHSS |
| 301 | FSLGEGNGSP NHQPEPPPPV TDNLLPTTTP QEAQQWLHRN RFSTFTRLFT NFSGADLLKL |
| 361 | TRDDVIQICG PADGIRLFNA LKGRNVRPRL TIYVCQESLQ LEEQQQQQQQ QQQKHEDGDS |
| 421 | NGTFFVYHAI YLEELTAVEL TEKIAQLFSI SPCQISQIYK QGPTGIHVLI SDEMIQNFQE |
| 481 | EACFILDTMK QETNQSYHII LK |

GENBANK ID: M92299.1
VERSION M92299.2. GI:184292
MSSYFVNSFSGRYPNGPDYQLLNYGSGSSLSGSYRDPAANHTGS
YGYNYNGMDLSVNRSSASSSHEGAVGESSRAFPAPAQEPRFRQAASSCSLSSPESLPC
TNGDSHGAKPSASSPSDQATSASSSANFTEIDEASASSEPEEAASQLSSPSLARAQPE
PMATSTAAPEGQTPQIFPWMRKLHISHDNTCPDGKRARTAYTRYQTLELEKEFHFNRY
LTRRRRIEIAHALCLSERQIKIWFQNRRMKWKKDNKLKSMSLATAGSAEQP
GENBANK ID: M68891.1
VERSION M68891.1 GI:182995
MEVAPEQPGWMAHPAVLNANDPDSERPGLAHNYMEPAHVLPPDE
VDVFFNHLDSQGNPYYANPAEARAAVSYSPAHARLTGSQNCRPHLLHSPGLPWLDGGK
AALSAAAAHHHNPWTVSPFSKTPLHPSAAGGPGGPLSVYPGAGGGSGGGSGSSVASLT
PTAAHSGSHLFGFPPTPPKEVSPDPSTTGAASPASSSAGGSAARGEDKDGVKYQVSLT
ESMKMESGSPLRPGLATMGTQPATHHPIPTYPSYVPAAAHDYSSGLFHPGGFLGGPAS
SFTPKQRSKARSCSEGRECVNCGATATPLWRRDGTGHYLCNACGLYHKNNGQNRPLIK
PKRRLSAARRAGTCCANCQTTTTTLWRRNANGDPVCNACGLYYKLHNVNRPLTMKKEG
IQTRNRKMSNKSKKSKKGAECFEELSKCMQEKSSPFSAAALAGHMAPVGHLPPFSHSG
HILPTPTPIHPSSSLSFGNPEPSSMVTANG
GENBANK ID: XM_028606.2
VERSION XM_028606.2 GI:15304625
MDEMTAVVKIEKGVGGNNGGNGNGGGAFSQARSSSTGSSSSTGG
GGQESQPSHLALLAATCSRIESPNENSNNSQGPSQSGGTGELDLTATQLSQGPMAGRS
SLPPLGLPLPQRNRVAAVPMAAMAVSLPRIAQSLVGSMLCAAPNLQNQQVLTGLPGVM
PNIQYQVIPQFQTVDGQQLQFAATGAQVQQDGSGQIQIIPGANQQIITNRGSGGNIIA
AMPNLLQQAVPLQGLANNVLSGQTQYVTNVPVALNGNITLLPVNSVSAATLTPSSQAV
TISSSGSQESGSQPVTSGTTISSASLVSSQASSSSFFTNANSYSTTTTTSNNGIMNFT
TSGSSGTNSQGQIPQRVSGLQGSDALNIQQNQTSGGSLQAGQQKEGEQNQQTQQQQIL
IQPQLVQGGQALQALQAAPLSGQTFTTQAISQETLQNLQLQAVPNSGPIIIRTPTVGP
NGQVSNQTLQLQNLQVQNPQAQTITLAPMQGVSLGQTSSSNTTLTPIASAASIPAGTV
TVNAAQLSSMPGLQTINLSALGTSGIQVHPIQGLPLAIANAPGDHGAQLGLHGAGGDG
IHDDTAGGEEGENSPDAQPQAGRRTRREACTCPYCKDSEGRGSGDPGKKKQHICHIQG
CGKVYGKTSHLRANLRWHTGERPFNCTWSYCGKRFTRSDELQRHKRTNTGEKKFACPE
CPKRFNRSDHLSKHIKTHQNKKGGPGVALSVGTLPLDSGAGSEGSGTATPSALITTNM
VAMEAICPEGIARLANSGINVMQVADLQSINISGNGF
GENBANK ID: NP_009077.1
DEFINITION HOMO SAPIENS ZINC FINGER PROTEIN 161 (ZNF161), MRNA.
VERSION NB_007146.1 GI:6005967
CDS 42..1592
/CODON_START=4

| | |
|---|---|
| 1 | AGCGGGGGGA GTGGGGAGGA GGGGGGTCGG CCGCCGCAGC CATGGAGGCC AACTGGACCG |
| 61 | CGTTCCTGTT CCAGGCCCAT GAAGCTTCCC ATCACCAACA GCAGGCAGCA CAGAACAGCT |
| 121 | TGCTGCCCCT CCTGAGCTCT GCCGTGGAGC CCCCTGATCA GAAACCATTG CTTCCAATAC |
| 181 | CAATAACTCA GAAACCTCAG GGTGCACCAG AAACATTAAA GGATGCCATT GGGATTAAAA |
| 241 | AAGAAAAACC CAAAACTTCA TTTGTGTGCA CTTACTGCAG TAAAGCTTTC AGGGACAGCT |
| 301 | ATCACCTGAG GCGCCACGAA TCGTGCCACA CAGGGATCAA GTTGGTGTCC CGGCCAAAGA |
| 361 | AAACCCCCAC CACGGTGGTT CCCCTTATCT CTACCATCGC TGGGGACAGC AGCCGAACTT |
| 421 | CGTTGGTCTC GACCATTGCA GGCATCTTGT CAACAGTCAC TACATCTTCC TCGGGCACCA |
| 481 | ACCCCAGTAG CAGTGCCAGC ACCACAGCTA TGCCAGTGAC CCAGTCTGTC AAGAAACCCA |
| 541 | GTAAGCCTGT CAAGAAGAAC CATGCTTGTG AGATGTGTGG GAAGGCCTTC CGAGATGTGT |
| 601 | ACCATCTCAA TCGACACAAG CTCTCCCATT CAGATGAGAA ACCCTTTGAG TGTCCTATTT |
| 661 | GTAATCAGCG CTTCAAGAGG AAGGACCGGA TGACTTACCA TGTGAGGTCT CATGAAGGAG |
| 721 | GCATCACCAA ACCCTATACT TGCAGTGTTT GTGGGAAAGG CTTCTCAAGG CGTGACCACT |
| 781 | TAAGCTGTCA TGTAAAACAT GTCCATTCAA CAGAAAGACC CTTCAAATGC CAAACGTGCA |
| 841 | CTGCTGCCTT TGCCACCAAA GACAGACTGC GGACACACAT GGTGCGCCAT GAAGGCAAGG |
| 901 | TATCATGTAA CATCTGTGGG AAGCTCCTGA GTGCAGCATA CATCACCAGC CACTTAAAGA |
| 961 | CTCATGGGCA GAGCCAAAGT ATCAACTGTA ATACATGTAA ACAAGGCATC AGTAAAACAT |
| 1021 | GCATGAGTGA AGAGACCACT AACCAAAAGC AGCAGCAGCA GCAGCAGCAG CAACAACAAC |
| 1081 | AACAACAACA TGTGACAAGC TGGCCAGGGA AGCAAGTAGA AACACTCAGA CTGTGGGAAG |
| 1141 | AAGCTGTTAA AGCAAGGAAG AAAGAAGCTG CTAACCTGTG CCAAACCTCC ACGGCTGCTA |
| 1201 | CGACACCTGT GACTCTCACT ACTCCATTCA GTATAACATC CTCTGPGTCG TCTGAGACTA |
| 1261 | TGTCAAACCC AGTCACAGTG GCAGCTGCAA TGAGCATGAG AAGTCCACPA AATGTTTCAA |
| 1321 | GTGCAGTTAA CATAACCAGC CCAATGAACA TAGGGCATCC TGTAACTATA ACCAGTCCAT |
| 1381 | TATCCATGAC CTCTCCTTTA ACACTCACTA CCCCAGTCAA CCTCCCCACC CCCGTCACTG |
| 1441 | CCCCAGTGAA TATAGCACAC CCTGTCACCA TCACATCTCC AATGAATCTA CCCACACCTA |
| 1501 | TGACATTAGC CGCCCCTCTC AATATAGCAA TGAGACCTGT AGACAGCATG CCTTTCTTGC |
| 1561 | CCCAAGCTTT GCCTACATCA CCGCCTTGGT AAACAGTATT ATAAAATCAA AATATGGGTA |
| 1621 | AAAGTAAATA TTTACCAGCA ACTTAACTTT TAGTTGATTA AAGCAAAAAG TAAACCATGA |
| 1681 | AATTGGGAGA TTTTATTACA TTAGTTAATA AGAGTGTGGT AGCATTTTTC TCCAATTTGG |
| 1741 | CTGGGATTAT TCAAAGTAGG GTGTGTATGT AACTTATCAC TGGACCACTT TAGTTTAATC |
| 1801 | AGAAATTCCT TTTAGCTGAC AACATTGCTT AAACAGGATA GTAGTTGGCA AGATGAAATG |
| 1861 | CCAGAATTAA AACCAATCAT AAGTAGAACC CACTTCAAAA TAAAAAAACA GCATTACTAT |
| 1921 | TTCTAATCCC AAGGAATCAC TTTATTGTAA ACACTAGCAG AACTCTTCTC CCTATACAAG |
| 1981 | GTGGATGGCT GATTTTAACC TGAAATTTTA AATCCACAGA TTGAGAGCTA GTGTAGAATT |
| 2041 | GTCTGTGTTT ATTGTTTTTA TGAGTAAATA CATGCATTGT CATAATAAAA TGCATTTCAG |
| 2101 | AGAATATGCA TTTTACCTTT GGGAATATGT TAATTTCAGG CAGCATTCCC TATGGGAAAG |
| 2161 | GTGATACCAG CTCTGATATG CAAAGCATAT GATAATTTAT CATTCTAACT TCAACGTATA |
| 2221 | ATAGGGATTG TGACCTGATA TTTGGAGATG TAAATATTGC TCAGCATATT AATCCCGATG |
| 2281 | GAATATAGCA TTGTAGTTGA CTTTTT |

GENBANK ID: AAA36598.1
DEFINITION HUMAN STEM CELL PROTEIN (SCL) MRNA, COMPLETE CDS.
VERSION M29038.1 GI:337958
CDS 81..725
/CODON_START=1

| | |
|---|---|
| 1 | AGTCAGAGTC ACTTTCTGTA AATGGTACTT AGGTAGGCGC GTCCGCCTCG GTTACAGCGG |
| 61 | AGCTGCCCGG CGACGGCCGC ATGGTGCAGC TGAGTCCTCC CGCGCTGGCT GCCCCCGCCG |
| 121 | CCCCCGGCCG CGCGCTGCTC TACAGCCTCA GCCAGCCGCT GGCCTCTCTC GGCAGCGGGT |
| 181 | TCTTTGGGGA GCCGGATGCC TTCCCTATGT TCACCACCAA CAATCGAGTG AAGAGGAGAC |
| 241 | CTTCCCCCTA TGAGATGGAG ATTACTGATG GTCCCCACAC CAAAGTTGTG CGGCGTATCT |
| 301 | TCACCAACAG CCGGGAGCGA TGGCGGCAGC AGAATGTGAA CGGGGCCTTT GCCGAGCTCC |
| 361 | GCAAGCTGAT CCCCACACAT CCCCCGGACA AGAAGCTCAG CAAGAATGAG ATCCTCCGCC |
| 421 | TGGCCATGAA GTATATCAAC TTCTTGGCCA AGCTGCTCAA TGACCAGGAG GAGGAGGGCA |
| 481 | CCCAGCGGGC CAAGACTGGC AAGGACCCTG TGGTGGGGGC TGGTGGGGGT GGAGGTGGGG |
| 541 | GAGGGGGCGG CGCGCCCCCA GATGACCTCC TGCAAGACGT GCTTTCCCCC AACTCCAGCT |
| 601 | GCGGCAGCTC CCTGGATGGG GCAGCCAGCC CGGACAGCTA CACGGAGGAG CCCGCGCCCA |
| 661 | AGCACACGGC CCGCAGCCTC CATCCTGCCA TGCTGCCTGC CGCCGATGGA GCCGGCCCTC |
| 721 | GGTGATGGGT CTGGGCCACC AGGATCAGCC AGGAGGGCGT TCTTAGGCTG CTGGGATGGT |
| 781 | GGGCTTCAGG GCAGGTGGGG TGAGAATTGG GCGGCTCTGA AGCAAGGCGG TGGACTTGAA |
| 841 | CTTTCCTGGA TGTCTGAACT TTGGGAAGCC TTTACTGACC CTGGGGCTGG CTTTTCTGTT |
| 901 | TCCTGTACCA GTAGGAGAIC AGAAAAATGG AGCAAAGTGG TAGGTACTTT TTGTGAAGAC |
| 961 | GGCACGGTCT TCCCTCTTCC CTCAGTCCCA AATCCTTCCC AAGTAAGAGG CTGGAGTTGT |
| 1021 | CACTGCTTTT GGCCTGGAGT TTGGGATCCC TGTCTTTCCT AAGACCTGGG GTTGTCAGCT |
| 1081 | CTCATCTGAG GCATCCAGCA GTCTCTGCCT TGCCTTTAGC CCCTCCCAAG CTGGCTGGGG |
| 1141 | TGGCCTGTGT GGCCACTTCT GTCCATATTT ATAGGTACCC AATAGCTGCC CATTTCGTGA |
| 1201 | GCCCCATCTT CACCCAGGCC TATGTTGATC CATCCAGCTT GCCAGATGCT GCAGAGTCAC |
| 1261 | AAGCCTCGAG GTGCCTTCTT CAGGGCCTGG TTGAAGAAGA TGATCAGTGG ACAGTCTGCT |
| 1321 | CTAGATGAGC TGGGCCGGAG GGTCAGGAAA CCCAGTCGCC CTTACTTCTT GCCCTGGGGA |
| 1381 | TCAAAGTTCT GCTTTCTCCC CAATGAGACT TGCCTTCCTA AGCCTGTGGC TGTGGAGACC |
| 1441 | ATGTCTGCAG CCCTGAGAAA GCCCTGTCGG GCTTTGTGTG AAGGCAGAGA AAGGGACAAT |
| 1501 | GATACTAGAG TGATATGGAG CAAGAGATAT TTTGGGCATG TGGGCTTCAA CTCCTCGACA |
| 1561 | TCACTGTTCA TGCTGGCGAG TGAATGCCAG TGTGCTGATG GGCGTACGCT GGTGCTGAGT |
| 1621 | AGATGCGCAG CCCCATCTGT GCATTCTCCT GGATGCTTAG AGGGATTTCT TTGCTGTAAG |
| 1681 | ATGTCTGTTT GCTGATGGTC TGGTCTATGT TCCGAATTGA GCACAAAACC TGTCCTATGA |
| 1741 | ATGCTTTGCA TTTGGAATTT TTGCTTGACT TCAGTTATTG GTGGAATCTT TAGCGCTCAA |
| 1801 | TAGGACCAGG ATCCAGCCTC ACTTCTAGGG TATGGGAAAT CCAATCAGAG ACCAGGCCCT |
| 1861 | GGCTAAGACC CAAACATATG CACATTCACT TAGCAGAACC TTAAACACCC CTCAGTTGTG |
| 1921 | CAGCTTTTGG TCATCAAGGG TGCGTCTGGG AGGTTGGTTT AATGCAATAG AAGTGCTCCC |
| 1981 | CTCTGAAAGT TGTACATGAA ATTTTTGTAA ATCACATCCT TATCCTTCAT CTTTTAAAGA |
| 2041 | AATAACCACT GCAAGTCCTT TTGTAAAGTG AAGAATCCTT TTGTAGAATG AACCACTGCC |
| 2101 | CCTTCATTGA TTTCCTGTGT CAATCCAGAT GGTGGGATGT GGTTTTCTTA AGGTGAGGCC |
| 2161 | TGTCTGTGAC CTGCATCTAA GCCCATGGGA CAAATTGCAC AGAAGTCCTG TATGTCTGTC |
| 2221 | ATTGTACCCT TAAGTCACCC TAGCCCTCTC CCTCTAGGCT CTGCCTTCGA GGTCAGAGGA |
| 2281 | GAGATAGCCT GTGGCCCTGT CCTGCCATGC AAGAACTCAT CACTGTGGCT GTCTGGAAAG |
| 2341 | CCCCCCCTTA TAGTTTGGGC TTCAGCCTAG TGGCTTGTCC TGACCATGAT GGGGCCCTAA |
| 2401 | TTCAGCCATG TACAGACAGA GAATATGTCT GCTCCTTTCC CCTTCCTTTT AAGTAAGGTC |
| 2461 | CAATTCTCGA GCTTGGGGCA ACATTGTTCA CCTTTGTAGC ACTCAGGCTC TCCATTCAAT |
| 2521 | TTCAGGCTCC CCAGATCATG TTTTGGTGAA AATTAGGGTT GGTTCCTTTC CAACGTTTGG |
| 2581 | AAGATCCTGT GAGGAGCCCC ATCTGTCTAA AGATAGAGTC ATTGCTGTAG GATCTAAGGC |
| 2641 | TGTTTGCTTC ACCGTGGATT CGCTTGAGTT AGGAATGAGA ACTACCGACA GTATGGATGG |
| 2701 | GTGGATGGGT TTTATGAGAT GGATCACATA TTTTATTAAG AACTCAAACT TCTGGCTCCC |
| 2761 | TCTTCTTTCA GACTTGCCAT GTGACTCTGG CTTGGCCTAT CTCCTAGGGC TATGGTGTGG |
| 2821 | ACTGAATGGG ATCATGAAAG TAGACAGTTT TGAGAACGTA AAGAACTTTT TCTTTTCCCT |
| 2881 | CAATCTCAAT CCTGCAGTGG GGTTTCGCAG CCTGAGTCCA CGACCTAGGC AGTAGGCCGG |
| 2941 | TGTGCCTGAC TGCCCAGCAT TTGGGTAATT TAGATTGTAA ACCGCTTTGG CCTGAGTTAT |
| 3001 | TGAGATTGTC CTCATTTCTC CAGATTATCT ATTTGTGTGT GTGTGTGTGT GTGTGTGAGA |
| 3061 | GACGGTGTCT TGTTCTGTCA CTCAGGCTGG AGTACAGTGG TGCCATCATT GCTGTCTGCA |
| 3121 | GCCTTGAACT CTGGGCTCAA GCAATCCTCT CACCTCAGCC TCCCGAGTAG GGAGGACCAC |
| 3181 | AGGTGTGAGC CACCACACCT GGCTAATTTT TACTTTTTTT TTTTTTTGGT AGAGATGGAG |
| 3241 | TCTTGCTATA TTGCCCAGGC TGGTCTTGAA GTCCTGGCTT CAGGCAATTC TCCTGCCTTT |
| 3301 | GCCTCCAGAA GCACTGGGAT CACAGGTGTC AGCCATTGCA CCCAGCCCAG ATTGTCTTAA |
| 3361 | TTTCTATCTT GTTCCAAGGC CAGGGACAGT AATAAGAATG GAAAAGAGAT ATGGGAACAC |
| 3421 | TGGCAGACTG TGTAAAATGT AATGCAACTA CCCAAAACAA GCCTGGTAGG AAAGGGCAAG |
| 3481 | TCTTTAGGTC TTTGTAAGAA CTAAAGAAGA TCTGTAATTT TTATTTTCAC CCTCTGTACC |
| 3541 | CCATGACCTT ATCCTTCCTC TCCTTCCTTG TTACCCATGA AAAACTGGCA ACATTCCAAG |
| 3601 | AATAGCATCT GTACAAAGGG GAAAGAACAT AAAGGTAAAA CAAAACAAAA CAACATTTTG |
| 3661 | AGAACRAAGA TGACCATAAC CACTGAAGGG AATCACATCT TTTAAGACAA ATTCATATTC |
| 3721 | TTTTATTTGT TATGGCAGAT GACAAGATGG TACAACCTTT ATTCTTTTCC AAAATAAAAC |
| 3781 | AAAGGGCACA GCATCTGTAG TCAGCCGACA ACTCTTTCGG CCTTTTGGGG GTGGGTCTGG |
| 3641 | CCGTACTTGT GATTTCGATG GTACGTGACC CTCTGCTGAA GACTTGCCCC CTGCCCGTGT |
| 3901 | ACATAGTGCA TTGTTTCTGT GGGCGGGCCC AGCACTTTCC GTCAACGTTG TACTGTATGT |
| 3961 | GATGAATTGC GTTGGTCTCT GCATTTTTCT GCAGAAGAGG AGTAACCGCT CCAGGTACCT |
| 4021 | TGACCTTTGT ACAGGCCAGA GGCCAACACT GTGGGTGTGT GACTCTTTAG CAAAAAAAAC |
| 4081 | CCATGTGGTG ATGATGTGTC TATATATGTG AGGATGTATC GGGAAGATTT CTAAATAAAA |
| 4141 | GTTTTACAAA GGG |

GENBANK ID: NP_006168
DEFINITION HOMO SAPIENS NEURAL RETINA LEUCINE ZIPPER (NRL), MRNA.
VERSION NM_006177.1 GI:5453801
CDS 118..831
/CODON_START=1

| | |
|---|---|
| 1 | CCAGGCCCTG CTCCATGGAG CCTTCAGTCT CCTGGGAAGC TGTGCCTGTC TGGCTCTGGC |
| 61 | ACTGACCACA TCCTCTCGGC CATTTCTGAA GTGCACTCCT CCCAGCCCAG CTCCAGAATG |
| 121 | GCCCTGCCCC CCAGCCCCCT GGCCATGGAA TATGTCAATG ACTTTGACTT GATGAAGTTT |
| 181 | GAGGTAAAGC GGGAACCCTC TGAGGGCCGA CCTGGCCCCC CTACAGCCTC ACTGGGCTCC |
| 241 | ACACCTTACA GCTCAGTGCC TCCTTCACCC ACCTTCAGTG AACCAGGCAT GGTGGGGGCA |
| 301 | ACCGAGCGCA CCCGGCCAGG CCTGGAGGAG CTGTACTGGC TGGCTACCCT GGAGGAGGAG |
| 361 | CTGGGGGCTG GGGAGGCATT GGGGCTGAGT CCTGAAGAGG CCATGGAGCT GCTGCAGGGT |
| 421 | CAGGGCCCAG TCCCTGTTGA TGGGGCCGAT GGCTACTACC CAGGGAGCCC AGAGGAGACA |
| 481 | GGAGCCCAGC ACGTCCAGCT GGCAGAGCGG TTTTCCGACG CGGCGCTGGT CTCGATGTCT |
| 541 | GTGCGGGAGC TAAACCGGCA GCTGCGGGGC TGCGGGCGCG ACGAGGCGCT GCGGCTGAAG |
| 601 | CAGAGGGGGC GCACGCTGAA GAACCGCGGC TACGCGCAGG CCTGTCGCTC CAAGCGGCTG |
| 661 | CAGGAGGGGG GCGGGCTGGA GGCCGAGCGC GCCCGCCTGG CCGCCCAGCT GGACGCGCTG |
| 721 | CGGGCCGAGG TGGCCCGCCT GGCCCGGGAG CGCGATCTCT ACAAGGCTCG CTGTGACCGG |
| 781 | CTAACCTCGA GCGGCCCCGG GTCCGGGGAC CGCTGCCACG TCTTCCTCTG AGCCGTTCAG |
| 841 | AGCACCTTGT GGTGTAGTGG GGGCTGGGTG GGGTGGCTCC GCCCAGGAGG CGGCTGCACG |
| 901 | GTTCTCTGCA TCGTTACCAG AGCGCCTTCT GGTCCTAGCC ACGCCCTGTA TGACCGCGCA |
| 961 | AATATCCCCA AAGCTTTTGG GTCCTCAAGT CATGCCCGAA TTTAGATGCT GGTCATTTTC |
| 1021 | TGGAGAGGGG TCCCCTCCCC TTACGAACAC AAAAACCCAG CCCACATGAC TAGCACGCTG |
| 1081 | AGCTCTGCAG GGACCAGTGC CAGGCACTGG GGGGTGGAAG TGTGGTGACA CAGTGAATGG |
| 1141 | GAGGTGGAGG AGGGTTGCAG CTCCCACCTC AGTTTAGTTT TTAATTCAGG GTTTTCAACC |
| 1201 | TGTAACACAT TAAAGCTGTA ATTAGCAATG AGGCTGTATT TTCATTCTGA AGCTTGTAAC |
| 1261 | CTCCCCATTT TAGCACTACA GAATTTTCAA GATTTCAATA TCCAACAACT AGATAGATTA |
| 1321 | GGACCTCTAT CGGAGATGCT TTTTCCCTGC CCAACCCTGT GGCCTTCAGG GCTCAGAGCA |
| 1381 | GCAAAGGCCT GAAGAGTGAG CTCTGGGGGT TGTTGGTGTG GGTTGGGAGA GAGCTGTGTG |
| 1441 | CAGAAGTCTG GAAACCTGGG TCCTAGTCCC AGCTCTTCCA TGGGATCCCC CTGTCACCCT |
| 1501 | GAGCAAATCA GTTGCTTCCT GGACTTGTGT TACTTCATCT AATTCTCATG TGGATTGGAC |
| 1561 | GACTTCTCCT CCCTTTCCAG TTCTGGCATC TCCCCAGTAT GGAAGTCCCG GTGGTCTCCC |
| 1621 | CAAGAAGTCC CCAAGACAAT CTCGCCAAAG GCACCTCCTA TCCTCCTGCA GTTTCCCACC |
| 1681 | TGCAGCCTAG GCAGGGCATG CACAGCCCAG GCGAGGAAGC CTGCCTTCTC TGTGAGCACA |
| 1741 | TACGTGGGTC CTCCGCAGCT CCCTCCAGCC TGTCTGGGCC TCCAGACCTG CACAGGGTGC |
| 1801 | TCCTGCCACC TCCCACCTCT CTGAGGGCTG AGGTGAGACT TCTCCTGGGA TGACAATTTG |
| 1861 | CTGAGAGAGT GCAGCTTTTC TGAATTAAAC TTGAAGTCCA CGCAGAATTC TAATGCAATA |
| 1921 | AGCTAAATGT T |

GENBANK ID: AAA58399.1
VERSION M95809.1 GI:179568
/GENE=“BTF2”
CDS 55..1701
/CODON_START=1

| | |
|---|---|
| 1 | AGTTAGTTAC TTCCTGTCTA GAGTTGTAGC TTCCACCTGC ACCTTCTAGC CACCATGCCA |
| 61 | ACCTCATCTG AAGAAGTTTT GCTGATTGTA AAGAAAGTGC GTCAAAAGAA GCAGGATGCA |
| 121 | GCTCTGTACC TCATGGCAGA AAGAATTGCT TGGGCACCTG AAGGCAAAGA TAGATTTACA |
| 181 | ATCAGCCATA TGTATGCAGA TATTAAATGC CAGAAAATTA GTCCAGAAGG AAAAGCTAAA |
| 241 | ATTCAGCTTC AGCTGGTCCT ACATGCAGGG GACACAACTA ACTTCCATTT TTCCAATGAA |
| 301 | ACCACACCAG TGAAAGAGCG AGATGCAGTA AAAGACCTTC TTCAGCAGCT GCTGCCCAAA |
| 361 | TTCAAGAGGA AAGCAAATAA AGAACTGGAA GAGAAGAACA GAATGCTGCA AGAAGATCCT |
| 421 | GTTTTGTTTC AGCTTTATAA AGACCTTGTT GTGAGTCAAG TGATCAGTGC TGAGGAATTC |
| 481 | TGGGCCAATC GTTTAAATGT GAATGCAACA GATAGTTCTT CCACATCCAA TCATAAGCAG |
| 541 | GATGTTGGCA TTTCTGCTGC ATTTCTGGCT GATGTCCGGC CCCAAACTGA TGGCTGTAAC |
| 601 | GGTCTAAGAT ATAATTTAAC TTCTGATATC ATTGAGTCCA TATTTAGGAC CTATCCAGCA |
| 661 | GTAAAAATGA AATATGCAGA AAATGTTCCC CACAACATGA CAGAGAAGGA ATTCTGGACA |
| 721 | CGTTTTTTCC AGTCCCATTA TTTTCACAGG GATCGGCTGA ATACAGGGTC AAAGGATCTC |
| 781 | TTTGCAGAAT GTGCCAAAAT AGATGAAAAA GGCCTAAAAA CAATGGTTTC ATTAGGAGTG |
| 841 | AAAAACCCAC TACTAGATTT AACAGCTTTG GAAGATAAAC CATTAGATGA GGGCTATGGC |
| 901 | ATTTCCTCTG TGCCATCTGC TTCCAATTCT AAATCCATAA AAGAGAATAG TAATGCTGCC |
| 961 | ATCATCAAGA GATTTAACCA TCACAGTGCC ATGGTCCTGG CAGCTGGACT CAGAAAACAA |
| 1021 | GAAGCACAAA ATGAACAAAC TAGTGAGCCC AGCAACATGG ATGGAAATTC CGGAGATGCA |
| 1081 | GACTGCTTTC AGCCAGCAGT CAAAAGGGCG AAATTACAAG AGTCCATTGA ATATGAAGAC |
| 1141 | TTGGGGAAAA ATAATTCTGT AAAAACGATT GCACTAAACC TCAAGAAGTC AGATAGGTAT |
| 1201 | TATCATGGTC CAACTCCAAT CCAGTCACTA CAGTATGCAA CAAGTCAGGA CATTATTAAT |
| 1261 | TCTTTTCAAA GTATTAGACA AGAAATGGAA GGTTATACAC CCAAGTTAAC TCAGGTTCTC |
| 1321 | TCAAGTAGTG CTGCCAGTAG TACCATCACA GCACTGTCAC CTGGAGGGGC ACTTATGCAG |
| 1381 | GGAGGAACAC AGCAAGCCAT AAACCAGATG GTGCCAAATG ATATTCAATC TGAATTGAAA |
| 1441 | CACTTATATG TAGCTGTTGG AGAACTTCTA CGACATTTCT GGTCCTGCTT TCCTGTTAAT |
| 1501 | ACGCCATTCC TAGAAGAAAA GGTAGTGAAA ATGAAAAGTA ATTTGGAACG ATTCCAAGTT |
| 1561 | ACGAAGCTCT GTCCATTCCA AGAAAAGATT CGGAGACACT ATTTAAGCAC AAATTTGGTA |
| 1621 | AGTCACATAG AAGAGATGCT CCAGACAGCC TACAACAAGC TCCACACATG GCAGTCACGG |
| 1681 | CGTCTGATGA AGAAAACGTG AGGTGGCCAT GATGCTTACA GGTTTTGTGA GATTGAGAGA |
| 1741 | ACTATGACCT GCAGCAACTC TGGAAACCTG GCCTGACAGA CAAGCAGATG ACCTCACAGG |
| 1801 | AGTGATAAGA AACATCTGCT CCACGCCAAC TCCCAGAGCT GATGCTATTG TACTTGCACA |
| 1861 | TTGGAGACTG AAAGGAAAGA AGGGACTAAA TGC |

GENBANK ID: AAA65605.1
DEFINITION HUMAN OCTANER BINDING TRANSCRIPTION FACTOR 1 (OTF1) MRNA,
VERSION L20433.1 GI:418015
CDS 235..1497
/CODON_START=1

| | |
|---|---|
| 1 | GCGGGGCTAG AGCTGTCGGA GAAGCGGGAC CGCGAGGCCG GCGCGCGGCG CTCTGCGCGG |
| 61 | TCAGAGGGAG CGCCTGGCAG CAGCAGGAGC AGCAGCAGCA GCCCGCGGCG GGGCCGCCGC |
| 121 | CAGCCGCCGC GACCGCCGCG GCTGCAGCCT CCGAAGGGAG GCCGGGTGAG CCGGCGTACG |
| 181 | CACTTTCCCG CGGACTTTCG GAGTGTTTGT GGATATACAT GCCAAGCCGC CACGATGATG |
| 241 | TCCATGAACA GCAAGCAGCC TCACTTTGCC ATGCATCCCA CCCTCCCTGA GCACAAGTAC |
| 301 | CCGTCGCTGC ACTCCAGCTC CGAGGCCATC CGGCGGGCCT GCCTGCCCAC GCCGCCGCTG |
| 361 | CAGAGCAACC TCTTCGCCAG CCTGGACGAG ACGCTGCTGG CGCGGGCCGA GGCGCTGGCG |
| 421 | GCCGTGGACA TCGCCGTGTC CCAGGGCAAG AGCCATCCTT TCAAGCCGGA CGCCACGTAC |
| 481 | CACACGATGA ACAGCGTGCC GTGCACGTCC ACTTCCACGG TGCCTCTGGC GCACCACCAC |
| 541 | CACCACCACC ACCACCACCA GGCGCTCGAA CCCGGCGATC TGCTGGACCA CATCTCCTCG |
| 601 | CCGTCGCTCG CGCTCATGGC CGGCGCGGGC GGCGCGGGCG CGGCGGCCGG CGGCGGCGGC |
| 661 | GCCCACGACG GCCCGGGGGG CGGTGGCGGC CCGGGCGGCG GCGGCGGCCC GGGCGGCGGC |
| 721 | GGCCCCGGGG GAGGCCGCGC TGGCGGCCCG GGGGGCGGCG GCGGCGGCCC GGGCGGCGGG |
| 781 | CTCCTGGGCG GCTCCGCGCA CCCTCACCCG CATATGCACA GCCTGGGCCA CCTGTCGCAC |
| 841 | CCCGCGGCCG CCGCCGCCAT GAACATGCCG TCCGGGCTGC CGCACCCCGG GCTGGTGGCG |
| 901 | GCGGCGGCGC ACCACGGCGC GGCAGCGGCA GCGGCGGCGG CGTCGGCCGG GCAGGTGGCA |
| 961 | GCGGCATCGG CGGCGGCGGC CGTCGTGGCC GCAGCGGGCC TGGCGTCCAT CTGCGACTCG |
| 1021 | GACACGGACC CGCGCCAGCT CCAGGCCTTC GCGGAGCGCT TCAAGCAGCG GCGCATCAAG |
| 1081 | CTGGGCGTGA CGCAGGCCGA CGTGGGCTCG GCGCTGGCCA ACCTCAAGAT CCCGGGCGTG |
| 1141 | CGCTCACTCA GCCAGAGCAC CATCTGCAGG TTCGAGTCGC TCACGCTCTC GCACAACAAC |
| 1201 | ATGATCGCGC TCAAGCCCAT CCTGCAGGCG TGGCTCCAGG AGGCCGAGGG CCCCCAGCGC |
| 1261 | GAGAAAATGA ACAAGCCTGA GCTCTTCAAC GGCGGCGAGA AGAAGCGCAA GCGGACTTCC |
| 1321 | ATCGCCGCGC CCGAGAAGCG CTCCCTCGAG GCCTACTTCG CCGTGCAGCC CCGGCCCTCG |
| 1381 | TCCGAGAAGA TCGCCGCCAT CGCCGAGAAA CTGGACCTCA AAAAGAACGT GGTGCGGGTG |
| 1441 | TGGTTTTGCA ACCAGAGACA GAAGCAGAAG CGGATGAAAT TCTCTGCCAC TTACTGAGGG |
| 1501 | GGCTGGGAGG TGTCGGGCGG GACAGAATGG GGAGCTGAGG AGGCATTTTT GGGGGGCTTT |
| 1561 | CCTCTGCTTG CCTCCCCTCG GATTTGGAGT GTCCGTTATC CTGCCTGCAT TTGGGGAGTC |
| 1621 | CCTTCTCGCT CTCTTTCCTC CACCCATTCT CTGATTTTCC TGCCTTTGCT GTCCCCTAGC |
| 1681 | CTTGAGGACT GGGGTGCTGG GTGTGGGGAT TGGAGTATAG GGTAGGGGAG AAGGGGGGGA |
| 1741 | GCATTCGGGG GAGTGGGGAG TGGGGGGAAG GAAAGCGGAG ACCGGACCAG GGGTTTTAAG |
| 1801 | GAGCAGGATG GTTCTGGGGT TTGGGTGGGG GGAGACGCGG GAAGGGTAGG AAAATGGACT |
| 1861 | GTTTCTGACC AGAGACACTT ACCTAAATAT CCTGGGGACC AAGGAACTAT GTACAAAAAC |
| 1921 | AAACCTACCA ACCACCAAAA ACTAGACAAA TAAAGACAAA CTAAAACAAA ACAGAACAAA |
| 1981 | AGCAAAGGAA AATGCTTTAG AAATTTTAAC TCCGGGGAGC CATAATCTGC AACTTCATTT |
| 2041 | TCCCCCATAG AAGAGAAAAA AGACCACCAC CATTATTACG ACCTCCCCAA CCCTACACGC |
| 2101 | ACGAACTGAG TCGAAAAACG AAAACCAAAC GAGCGAGAAG TTGAAGTTCT GGGTATCAAA |
| 2161 | GCTAGTTGTT CTGTCTGCGT GTTTAATTTT TCCCTCTCTC ACCTCCACCC CATCCATATC |
| 2221 | CTCTTTATTT CCTCCGTTCC AATGAGAGGC CTATGGCTGC TCTCCAATCC CGGGAAGTGA |
| 2281 | GTGGGAGCAC AGCTGAAAAG AGAGGGTCAG GGGGAGGCTG GCTGCTTGCT TAGGTGGAAT |
| 2341 | CCAACTTTTC CCGTGGCCCT GCCTATACTC TGGTGGCCTG GTCCTGTTGG GGTGGGGGTC |
| 2401 | TTTGGAGAGA AGGGCATAGT CTTTGAGCTA CTAAAAAGCA GAATTCCGGA GCTTCGAGAT |
| 2461 | ATCTTATTCT AGGAAAATGA AACAATTTTA ACAACAGTTT TTTTTCCTCT TATGTCGAAG |
| 2521 | ATCTAGTTTT AGACAATTTC AAAATAAGCT TTTCCCACTC ATAGAACTTT AACTTGCCCT |
| 2581 | TTCAGTTTTA TCTTTTTTTT AGAGAGAGGT TTAAACTACT GATTTTTCCT GTTGATTCAA |
| 2641 | ATAGACTAAT GGGGTGAAAG TTATTAGGAG AGATACTGTC TCCTGTTTTC TCCACTGAAC |
| 2701 | GAGACTCATC TTGCTCTTCT AGGTCCCGTT TCTTCCTCTC TTGGAGGACA TGAAATTATA |
| 2761 | GAAATGTTGA GAAGTTCCTG CTTTCTTTTG CGGTAGGACT TGGCTGTGAG AAAATCACCT |
| 2821 | AAATCCCAGA AAAGAGGAAG ACAGATTTAA AGTGCCCCCA CCCCCATTTG TTTCAAAGAG |
| 2881 | GTCTGCATGT TGGGCGAAAA CAGAACAACT GTGTTTCCTT TTACTTGTTC TTATTATTCA |
| 2941 | AGAGTCATTT ATTACAGGGG ATAAATGTTG GGTAGCAAGA ACTTTAATTT GCACTACCAG |
| 3001 | TCTCCCAAAT AGAAAATCAT GTATAGTATT TCATAGTAAT AATCAGGTAC CTTACAAGCT |
| 3061 | GCTGGTGGAT TTTAAAAAAT TAAGATAGTT GAAGGTGGTT AGGTAAAATG CCTGCTTTGT |
| 3121 | GTACAAGATA CTCTTTGGAT CTCTCGTAGA GATGGTTTGT TACCATCCTT TAATCATAAC |
| 3181 | TAAAACATTG AAAACAGAAC AAATGAGAAA AGAAAAAAAA CCTGCCGATT AACAAGACTG |
| 3241 | AAATCATGCA TGATCTGAAA GGTGTGGAAA GAAACACAAT TAGGTCTCAC TCTGGTTAGG |
| 3301 | CATTATTTAT TTAATTATGT TGTATATCAT TGTTTGCAGG GCAAACATTC TATGCATTTG |
| 3361 | AAACTGAGCA CTAAACTGGG CTAGCTTTCT GGTAGACCGT TTTGTGGCTA GTGCGATTTC |
| 3421 | ACAGTCTACT GCCTGTTTCC ACTGAAAACA TTTTTGTCAT ATTCTTGTAT TCAAAGAAAA |
| 3481 | CAGGAAAAAA GTTATTGTAA ATATTTTATT TAATGCACAC ATTCACACAG TGGTAACAGA |
| 3541 | CTGCCAGTGT TCATCCTGAA ATGTCTCACG GATTGATCTA CCTGTCTATG TATGTCTGCT |
| 3601 | GAGCTTTCTC CTTGGTTATG TTTTTTCTCT TTTACCTTTC TCCTCCCTTA CTTCTATCAG |
| 3661 | AACCAATTCT ATGCGCCAAA TACAACAGGG GGATGTGTCC CAGTACACTT ACAAAATAAA |
| 3721 | ACATAACTGA AAGAAGAGCA GTTTTATGAT TTGGGTGCGT TTTTGTGTTT ATACTGGGCC |
| 3781 | AGGTCCTGGT AGAACCTTTC AACAAACAAC CAAACAAAAA AAAA |

GENBANK ID: AAA61146.1
DEFINITION HUMAN TRANSCRIPTION FACTOR (E2A) MRNA, COMPLETE CDS.
VERSION M31523.1 GI:339477
CDS 31..1995
/CODON_START=1

| | |
|---|---|
| 1 | GCCTGAGGTG CCCGCCCTGG CCCCAGGAGA ATGAACCAGC CGCAGAGGAT GGCGCCTGTG |
| 61 | GGCACAGACA AGGAGCTCAG TGACCTCCTG GACTTCAGCA TGATGTTCCC GCTGCCTGTC |
| 121 | ACCAACGGGA AGGGCCGGCC CGCCTCCCTG GCCGGGGCGC AGTTCGGAGG TTCAGGTCTT |
| 181 | GAGGACCGGC CCAGCTCAGG CTCCTGGGGC AGCGGCGACC AGAGCAGCTC CTCCTTTGAC |
| 241 | CCCAGCCGGA CCTTCAGCGA GGGCACCCAC TTCACTGAGT CGCACAGCAG CCTCTCTTCA |
| 301 | TCCACATTCC TGGGACCGGG ACTCGGAGGC AAGAGCGGTG AGCGGGGCGC CTATGCCTCC |
| 361 | TTCGGGAGAG ACGCAGGCGT GGGCGGCCTG ACTCAGGCTG GCTTCCTGTC AGGCGAGCTG |
| 421 | GCCCTCAACA GCCCCGGGCC CCTGTCCCCT TCGGGCATGA AGGGGACCTC CCAGTACTAC |
| 481 | CCCTCCTACT CCGGCAGCTC CCGGCGGAGA GCGGCAGACG GCACCCTAGA CACCCAGCCC |
| 541 | AAGAAGGTCC GGAAGGTCCC GCCGGGTCTT CCATCCTCGG TGTACCCACC CAGCTCAGGT |
| 601 | GAGGACTACG GCAGGGATGC CACCGCCTAC CCGTCCGCCA AGACCGCCAG CAGCACCTAT |
| 661 | CCCGCCCCCT TCTACGTGGC AGATGGCAGC CTGCACCCCT CAGCCGAGCT CTGGAGTCCC |
| 721 | CCGGGCCAGG CGGGCTTCGG GCCCATGCTG GGTGGGGGCT CATCCCCGCT GCCCCTCCCG |
| 781 | CCCGGTAGCG GCCCGGTGGG CAGCAGTGGA AGCAGCAGCA CGTTTGGTGG CCTGCACCAG |
| 841 | CACGAGCGTA TGGGCTACCA GCTGCATGGA GCAGAGGTGA ACGGTGGGCT CCCATCTGCA |
| 901 | TCCTCCTTCT CCTCAGCCCC CGGAGGCACG TACGGCGGCG TCTCCAGCCA CACGCCGCCT |
| 961 | GTCAGCGGGG CCGACAGCCT CCTGGGCTCC CGAGGGACCA CAGCTGGCAG CTCCGGGGAT |
| 1021 | GCCCTCGGCA AAGCACTGGC CTCGATCTAC TCCCCGGATC ACTCAAGCAA TAACTTCTCG |
| 1081 | TCCAGCCCTT CTACCCCCGT GGGCTCCCCC CAGGGCCTGG CAGGAACGTC ACAGTGGCCT |
| 1141 | CGAGCAGGAG CCCCCGGTGC CTTATCGCCC AGCTACGACG GGGGTCTCCA CGGCCTGCAG |
| 1201 | AGTAAGATAG AAGACCACCT GGACGAGGCC ATCCACGTGC TCCGCAGCCA CGCCGTGGGC |
| 1261 | ACAGCCGGCG ACATGCACAC GCTGCTGCCT GGCCACGGGG CGCTGGCCTC AGGTTTCACC |
| 1321 | GGCCCCATGT CGCTGGGTGG GCGGCACGCA GGCCTGGTTG GAGGCAGCCA CCCCGAGGAC |
| 1381 | GGCCTCGCAG GCAGCACCAG CCTCATGCAC AACCACGCGG CCCTCCCCAG CCAGCCAGGC |
| 1441 | ACCCTCCCTG ACCTGTCTCG GCCTCCCGAC TCCTACAGTG GGCTAGGGCG AGCAGGTGCC |
| 1501 | ACGGCGGCCG CCAGCGAGAT CAAGCGGGAG GAGAAGGAGG ACGAGGAGAA CACGTCAGCG |
| 1561 | GCTGACCACT CGGAGGAGGA GAAGAAGGAG CTGAAGGCCC CCCGGGCCCG GACCAGCCCA |
| 1621 | GACGAGGACG AGGACGACCT TCTCCCCCCA GAGCAGAAGG CCGAGCGGGA GAAGGAGCGC |
| 1681 | CGGGTGGCCA ATAACGCCCG GGAGCGGCTG CGGGTCCGTG ACATCAACGA GGCCTTTAAG |
| 1741 | GAGCTGGGGC GCATGTGCCA ACTGCACCTC AACAGCGAGA AGCCCCAGAC CAAACTGCTC |
| 1801 | ATCCTGCACC AGGCTGTCTC GGTCATCCTG AACTTGGAGC AGCAAGTGCG AGAGCGGAAC |
| 1861 | CTGAATCCCA AAGCAGCCTG TTTGAAACGG CGAGAAGAGG AAAAGGTGTC AGGTGTGGTT |
| 1921 | GGAGACCCCC AGATGGTGCT TTCAGCTCCC CACCCAGGCC TGAGCGAAGC CCACAACCCC |
| 1981 | GCCGGCCACA TGTGAAAGGT ATGCCTCCGT GGGACGAGCC ACCCGCTTTC AGCCCTGTGC |
| 2041 | TCTGGCCCCA GAAGCCGGAC TCGAGACCCC GGGCTTCATC CACATCCACA CCTCACACAC |
| 2101 | CTGTTGTCAG CATCGAGCCA ACACCAACCT GACAAGGTTC GGAGTGATGG GGGCGGCCAA |
| 2161 | GGTGACACTG GGTCCAGGAG CTCCCTGGGG CCCTGGCCTA CCACTCACTG GCCTCGCTCC |
| 2221 | CCCTGTCCCC GAATCTCAGC CACCGTGTCA CTCTGTGACC TGTCCCATGG ATCCTGAAAC |
| 2281 | TGCATCTTGG CCCTGTTGCC TGGGCTGACA GGAGCATTTT TTTTTTTTCC AGTAAACAAA |
| 2341 | ACCTGAAAGC AAGCAACAAA ACATACACTT TGTCAGAGAA GAAAAAAATG CCTTAACTAT |
| 2401 | AAAAAGCGGA GAAATGGAAA CATATCACTC AAGGGGGATG CTGTGGAAAC CTGGCTTATT |
| 2461 | CTTCTAAAGC CACCAGCAAA TTGTGCCTAA GCGAAATATT TTTTTTAAGG AAAATAAAAA |
| 2521 | CATTAGTTAC AAGATTTTTT TTTTCTTAAG GTAGATGAAA ATTAGCAAGG ATGCTGCCTT |
| 2581 | TGGTCTCTGG TTTTTTTAAG CTTTTTTTGC ATATGTTTTG TAAGCAACAA ATTTTTTTGT |
| 2641 | ATAAAAGTCC CGTGTCTCTC GCTATTTCTG CTGCTGTTCC TAGACTGAGC ATTGCATTTC |
| 2701 | TTGATCAACC AGATGATTAA ACGTTGTATT AAAAAGACCC CGTGTAAACC TGAGCCCCCC |
| 2761 | CCGTCCCCCC CCCCGGAAGC CACTGCACAC AGACAGACGG GGACAGGCGG CGGGTCTTTT |
| 2821 | GTTTTTTTGA TGTTGGGGGT TCTCTTGGTT TTGTCATGTG GAAAGTGATG CGTGGGCGTT |
| 2881 | CCCTGATGAA GGCACCTTGG GGCTTCCCTG CCGCATCCTC TCCCCTCAGG AAGGGGACTG |
| 2941 | ACCTGGGCTT GGGGGAAGGG ACGTCAGCAA GGTGGCTCTG ACCCTCCCAG GTGACTCTGC |
| 3001 | CAAGCAGCTG TGGCCCCAGC GGTACCCTAC ACAACGCCCT CCCCAGGCCC CCCTAAGCTG |
| 3061 | CTCTCCCTTG GAACCTGCAC AGCTCTCTGA AATGGGGCAT TTTGTTGGGA CCAGTGACCC |
| 3121 | CTGGCATGGG GACCACACCC TGGAGCCCGG TGCTGGGGAC CTCCTGGACA CCCTGTCCTT |
| 3181 | CACTCCTTGC CCCAGGGACC CAGGCTCATG CTCTGAACTC TGGCTGAGAG GAGTCTGCTC |
| 3241 | AGGAGCCAGC ACAGGACACC CCCCACCCCA CCCCACCATG TCCCCATTAC ACCAGAGGGC |
| 3301 | CATCGTGACG TAGACAGGAT GCCAGGGGCC TGACCAGCCT CCCCAATGCT GGGGAGCATC |
| 3361 | CCTGGCCTGG GGCCACACCT GCTGCCCTCC CTCTGTGTGG TCCAAGGGCA AGAGTGGCTG |
| 3421 | GAGCCGGGGG ACTGTGCTGG TCTGAGCCCC ACGAAGGCCT TGGGCTGTGG CTCCGACCCT |
| 3481 | GCTGCAGAAC CAGCAGGGTG TCCCCTCGGG CCCATCTGTG TCCCATGTCC CAGCACCCAG |
| 3541 | GCCTCTCTCC AGGTCTCCTT TTCTGGTCTT TTGCCATGAG GGTAACCAGC TCTTCCCAGC |
| 3601 | TGGCTGGGAC TGTCTTGGGT TTAAAACTGC AAGTCTCCTA CCCTGGGATC CCATCCAGTT |
| 3661 | CCACACGAAC TAGGGCAGTG GTCACTGTGG CACCCAGGTG TGGGCCTGGC TAGCTGGGGG |
| 3721 | CCTTCATGTG CCCTTCATGC CCCTCCCTGC ATTGAGGCCT TGTGGACCCC TGGGCTGGCT |
| 3781 | GTGTTCATCC CCGCTGCAGG TCGGGCGTCT CCCCCCGTGC CACTCCTGAG ACTCCACCGT |
| 3841 | TACCCCCAGG AGATCCTGGA CTGCCTGACT CCCCTCCCCA GACTGGCTTG GGAGCCTGGG |
| 3901 | CCCCATGGTA GATGCAAGGG AAACCTCAAG GCCAGCTCAA TGCCTGGTAT CTGCCCCCAG |
| 3961 | TCCAGGCCAG GCGGAGGGGA GGGGCTGTCC GGCTGCCTCT CCCTTCTCGG TGGCTTCCCC |
| 4021 | TGCGCCCTGG GAGTTTGATC TCTTAAGGGA ACTTGCCTCT CCCTCTTGTT TTGCTCCTGC |
| 4081 | CCTGCCCCTA GGTCTGGGTG GCAGTGGCCC CATAGCCTCT GGAACTGTGC GTTCTGCATA |
| 4141 | GAATTCAAAC GAGATTCACC CAGCGCGAGG AGGAAGAAAC AGCAGTTCCT GGGAACCACA |
| 4201 | ATTATGGGGG GTGGGGGGTG TGATCTGAGT GCCTCAAGAT GGTTTTCAAA AAATTTTTTT |
| 4261 | TAAAGAAAAT AATTGTATAC GTGTCAACAC AGCTGGCTGG ATGATTGGGA CTTTAAAACG |
| 4321 | ACCCTCTTTC AGGTGGATTC AGACACCTGT CCTGTATATA ACACCACTGT AGCAATAAAC |
| 4381 | GTGACATTTT ATAAAG |

GENBANK ID: NM_000416.1
VERSION NM_000416.1 GI:4557879
MALLFLLPLVMQGVSRAENGTADLGPSSVPTPTNVTIESYNMNP
IVYWEYQIMPQVFVFTVEVKNYCVKNSENIDACTNISHHYCNISDNVCDPSNSLWVRV
KARVCQKESAYAKSEEFAVCRDCKIGPPKLDIRKEEKQINIDIFHFSVFVNCDEQEVD
YDPETTCYIRVYNVYVRMNGSEIQYKILTQKEGDCDEIQCQLAIPVSSLNSQYCVSAE
GVLEVWCVTTEKSKEVCITIFNSSIKCSLWIPVVAALLLWLVLSLVFICFYIKKINPL
KEKSIILPKSLISVVRSATLETKPESKYVSLITSYQPFSLEKEVVCEEFLSPATVPGM
HTEDNPCKVEHTEELSSITEVVTTEENIPDVVPGSELTPIERESSSPLSSNQSEPGSI
ALNSYESRNCSESDHSRNGFDTDSSCLESHSSLSDSEFPPNNKCEIKTEGQELITVIK
APTSFGYDKFHVLVDLLVDDSGKESLIGYRPTEDSKEFS
GENBANK ID: M27492.1
VERSION M27492.1 GI:186289
MKVLLRLICFIALLISSLEADKCKEREEKIILVSSANEIDVRPC
PLNPNEHKGTITWYKDDSKTPVSTEQASRIMQHKEKLWFVFAKVEDSGHYYCVVRNSS
YCLRIKISAKEVENEPNLCYNAQAIFKQKLPVAGDGCLVCPYMEFFKNENNELPKLQW
YKDCKPLLLDNIHFSGVKDRLIVMNVAEKHRGNYTCHASYTYLGKQYPITRVIEFITL
EENKFTRPVIVSPANETNEVDLGSQIQLICNVTGQLSDIAYNKWNGSVIDEDDPVLGE
DYYSVENPANKRRSTLITVLNISEIESRFYKNPFTCFAKNTHGIDAAYIQLIYPVTNF
QKHMIGICVTLTVIIVCSVFIYKIFKIDIVLWYRDSCYDFLPIKASDGKTYDAYILYP
KTVCEGSTSDCDIWVFKVLPEVLEKQCGYKLFIYCRDDYVGEDIVEVINENVKKSRRL
IIILVRETSGFSWLGGSSEEQIANYNALVQDGIKVVLLELEKIQDYEKMPESIKFIKQ
KHGAIRWSCDFTQGFQSAKTRFWKNVRYHMFVQRRSPSSKHQLLSPATKEKLQREAHV
PLG
GENBANK ID: L34059
VERSION L34059.1 GI:506409
MTACAGVLLLLLSLSCALRANNEDLTTRETCKAGFSEDDYTALI
SQNILEGEKLLQVKFSSCVGTKGTQYETNSMDFKVGADGTVFATRELQVPSEQVAFTV
TAWDSQTAEKWDAVVRLLVAQTSSPHSGHKPDKGKKVVALDPSPPPKDTLLPWPQHQN
ANGLRRRKRDWVIFPINVFENSRGPFFQQLVRIRSDKDNDIPIRYSITGVGADQPPME
VFSINSMSGRNYVTRPMDREEHASYHLRAHAVDNNGNKVENPIDLYIYVIDMNDNHPE
FINQVYNCSVDEGSKFGTYVMTITANDADDSTTANGMVRYRTVTQTPQSPSQNNFTIN
SETGDIVTVAAGWDREKVQQYTVIVQATDNEGNLNYGLSNTATAIITVTDVNDNPSEF
TASTFAGEVPENSVETVVANLTVMDRDQPHSBNWNAVYRIISGDPSGHFSVRTDFVTN
EGMVTVVKAVDYELNRAFNLTVNVSNQAPLASGIQNSFQSTAGVTISINDINEAPYFP
SNHKLILEEGVPPGTVLTTFSIAVDRDRFMQQAVRYSKLSDPASWLHINATNGQITTV
AVLDRESLYTKNNVYEATFLAADNCIFPAS0TGTLQIYLIDINDNAFELLPKEAQICE
RPNLNAINITAADADVHPNIGPYVFELPFVFAAVRKNWTITRLNCDYAQLSLRILYLE
AGMYDVFIIVTDSGNPFLSNTSIIKVKVCPCDDNGDCTTIGAVAAAGLGTGAIVAILI
CILILLTMVLLFVMWMKRREKERHTKQLLIDPEDDVREKILKYDEEGGGEEDQDYDLS
QLQQPEAMGHVPSKAPCVRRVDERPVGFEFQYPIRPMVPHPGDIGDFINEGLRAADND
PTAPPYDSLLVFDYEGSGSTAGSVSSLNSSSSGDQDYDYLNDWGPRFKKLADMYGGGE
ED
GENSANK ID: M77640
VERSION M77640.1 GI:186053
MVVALRYVWPLLLCSPCLLIQIPEEYEGHHVNEPPVITEQSPRR
LVVFPTDDISLKCEASGKPEVQFRWTRDGVHFKPKEELGVTVYQSFHSQSFTITGNNS
NFAQRFQGIYRCFASNKLGTAMSHEIRLMAEGAFKWPKETVKPVEVEEGESVVLPCNP
PPSAEFLRIYWMNSKILIHKQDERVTMGQNGNLYFANVLTSDNHSDYICHAEFFGTRT
IIQKEPIDLRVKATNSNIDRKPRLLFPTNSSSHLVALQGQPLVLECIAEGFPTPTIKW
LRPSGPMFADRVTYQNENKTLQLLKVGEEDDGEYRCLAENSLGSAREAYYVTVEAAPY
WLHKPQSHLY0PGETARLDCQVQGRPQPEVTWRINGIFVEELAKDQKYRIQRGALILS
NVQPSDTNVTQCEARNRNGLLLANAYIYVVQLPAKILTADNQTYMAVQGSTAYLLCKA
FGAPVPSVQWLDEDGTTVLQDERFFPYANGTLGIRDLQANDTCRYFCLAANDQNNVTI
MANLKVKDATQITQCFRSTIEKKGSRVTFTCQASFDPSLGPSITWRGDGRDLQELGDS
DKYFIEDGRLVIHSLDYSDQGNYSCVASTELDVVESRAQLLVVGSFGPVFRLVLSDLH
LLTQSQVRVSWSFAEDHNAFIEKYDIEFEDKENAFEKWYSLGKVFGNQTSTTLKLSPY
VHYTFRVTAINKYGPGEPSPVSETVVTPEAAFEKNPVDVKGEGNETTNMVTTWKPLRW
MDNNAFQVQYRVQWRPQGTRGPWQEQIVSDPFLVVSNTSTFVPYEIKVQAVNSQGKGP
EPQVTIGYSGEDYFQAIPELEGIETLNSSAVLVKWRPVDLAQVKGELRGYNVTYWREG
SQRKHSKRHIHKDHVVVFANTTSVILSGLRPYSSYHLEVQAFNGRGSGPASEFTESTP
EGVFGHPEALHLECQSNTSLLLRWQPPLSHNGVLTGYVLSYHPLDEGGKGQLSFNLRD
PELRTHNLTDLSPELRYRFQLQATTKEGPGEAIVREGGTMALSGISDFGNISATAGEN
YSVVSWVFKEGQCNFRFEILFKALGEEKGGASLSPQYVSYNQSSYTQWDLQPDTDYEI
HLFKERIAFRHQNAVKTNGTGRVRLFFAGFATEGWFIGFVSAIILLLLVLLILCIKRS
KGGKYSVKDKEDTQVDSEARPNKDETFGEYRSLESDNEEKAFGSSQPSLNGDIKPLGS
DDSLADYGGSVQVQFNEDGSFIGQYSGKKEKEAAGGNDSSGATSPINPAVALE
GENBANK ID: M59911.1
VERSION M59911.1 GI:186496
MGPGPSRAPRAPRLMLCALALMVAAGGCWSAFNLDTRFLVVKE
AGNPGSLFGYSVALERQTERQQRYLLLAGAPRELAVPDGYTNRTGAVYLCFLTAHKDD
CERMNITVKNDPGEHIIEDNWLGVTVASQGPAGRVLVCAHRYTQVLWSGSEDQRRMVG
KCYVRGNDLELDSSDDWQTYHNENCNSNTDYLETGMCQLGTSGGFTQNTVYFGASGAY
NWKGNSYNIQRKEWDLSEYSYKDPEDQGNLYIGYTMQVGSFILHPKNITIVTGAPRHR
HMGAVFLLSQEAGGDLRRRQVLEGSQVGAYFGSAIALADLNNDGWQDLLVGAPYYFER
KEEVGGAIYVFMNQAGTSFPAHPSLLLHCPSGSAFGLSVASIGDINQDGFQDIAVGAP
FEGLGKVYIYHSSSKGLLRQPQQVIHGERLGLPGLATFGYSLSGQMDVDENFYPDLLV
GSLSDHIVLLRARPVINIVHKTLVPRPAVLDPALCTATSCVQVELCFAYNQSAGNPNY
RRNITLAYTLEADRDRRPPRLRFAGSESAVFHGFFSNPENRCQKLELLLMDNLRDKLR
PIIISMNYSLPLRNPDRPRLGLRSLDAYPILNQAQALENHTEVQFQKECGPDNKCESN
LQMRAAFVSEQQQKLSRLQYSRDVRKLLLSINVTNTRTSERSGEDAHEALLTLVVPPA
LLLSSVRPPGACQANETIFCELGNPFKRNQRNELLIAFEVTGVTLHTRDLQVQLQLST
SSHQDNLWPMTLTLLVDYTLQTSLSMVNHRLQSFFGGTVMGESGMKTVEDVGSPLKYE
FQVGPNGEGLVGLGTLVLGLEWPYEVSNGKWLLYPTETTVHGNGSWPCRPPGDLINPL
NLTLSDPGDRPSSPQRRRRQLDPGGGQGPPFVTLAAAKKAKSETVLTCATGRAHCVWL
ECPIPDAPVVTNVTVKARVWNSTFTEDYRDFDRVRVNGWATLFLRTSIPTINMENKTT
WFSVDIDSELVEELPAETELWLVLVAVGAGLLLLGLIILLLWKCGFFKRARTRALYEA
KRQKAEMKSQPSETERLTDDY
GENBANK ID: M81695.1
VERSION M81695.1 GI:487829
MTRTRAALLLFTALATSLGFNLDTEELTAFRVGSAGFGDSVVQY
ANSWVVVGAPQKITAANQTGGLYQCGYSTGACEPIGLQVPPEAVNMSLGLSLASTTSP
SQLLACGPTVHHECGRNNYLTGLCFLLGPTQLTQRLPVSRQECPRQEQDIVFLIDGSG
SISSRNFATNMNFVRAVISQFQRPSTQFSLNQFSNKFQTHFTFEEFRRTSNPLSLLAS
VHQLQGFTYTATAIQNVVHRLFHASYGARRDATKTLIVITDGKKEGDSLDYKDVTPMA
DAAGIIRYATGVGLAFQNRNSNKELNDTASKPSQEHIFKVEDFDALKDIQNQLKEKIF
AIEGTETTSSSSFELENAQEGFSAVFTPDGPVLGAVGSFTWSGGAFLYPPNNSPTFIN
MSQENVDNRDSYLGYSTELALWKGVQSLVLGAPRYQHTGKAVIFTQVSRQWRNKAEVT
GTQTGSYFGASLCSVDVDTDGSTDLVLTGAPHYYEQTRGGQVSVCPLPRGWRRWWCDA
VLYGEQGHPWGRFGAALTVLGDVNGDKLTDVVIGAPGEEENRGAVYLFHGVLGPSISP
SNSQRTAGSQLSSRLQYFGQALSGGQDLTQDGLVDLAVGARGQVLLLRTRPVLWVGVS
MQFIPAETPRSAFECREQVVSEQTLVQSNTCLYIDKRSKNLLGSRDLQSSVTLDLALD
PGELSPRATFQETKNRSLSRVRVLGLKAHCENFNLLLPSCVEGSVTPTTLRLNFTLVG
KPLLAFRNLRPMLAALAQRYFTASLPFEKNCGADHTCQDNLGISFSFPGLKSLLVGSN
LELNAEVNVWNDGEDSYGTTITFSHPAGLSYRYVAEGGKQGQLRSLHLTCDSAPVGSQ
GTWSTSCRTNHLTFRGGAQTTFLATFDVSPKAVLGDRLLLTANVSSENNTPRTSKTTF
QLELPVKYAVYTVVSSHEQFTKYLNFSESEEKESHVAMHRYQVNNLGQRDLPVSTNFW
VPVELNQEAVWMDVEVSHPQNPSLRCSSEKIAPPASDFLAHIQKNPVLDCSTAGCLRF
RCDVPSFSVQEELDFTLKGNLSFGWVRQTLQKKVSVVSVAETTFDTSVYSQLPGQEAF
MRAQTTTVLEKYKVHNPTPLTVGSSTGGLLLLALITAVLYKVGFFKRQYKEMMEEANG
QTAPENGTQTPSPPSEK
GENBANK ID: X51841.1
VERSION X51841.1 GI:33910
MAGPEPSPWARLLLAALTSVSLSGTLANRCKKAPVKSCTECVRV
DKDCAYCTDEMFRDRRCNTQAELLAAGCQRESIVVMESSFQTTEETQTDTTLRRSQNS
PQGLRVRLRPGFERHFELEVFEPLESPVDLYTLNDFSNSMSDDLDNLKKMGQNLARVL
SQLTSDYTIGFGKFVDKVSVPQTDMRPEKLKEFWPNSDPPFSFKNVISLTEDVDEFRN
KLQGERISGNLDAPEGGFDAILQTAVCTRDIGWRFDSTHLLVESTESAFHYEADGANV
LAGIMSRNDERCHLDTTGTYTQYRTQDYPSVPTLVRLLAKHNIIPIFAVTNYSYSYYE
KLHTYFPVSSLGVLQEDSSNIVELLEEAFNRIRSNLDIRALDSPRGLRTEVTSKMFQK
TRTGSPHIRRGEVGIYQVQLRALEHVDGTHVCQLPEDQKGNIHLKPSFSDGLKMDAGI
ICDVCTCELQKEVRSARCSFNGDFVCGQCVCSEGWSGQTCNCSTGSLSDIQFCLREGE
DKPCSGRGECQCCHCVCYGEGRYEGQFCEYDNFQCPRTSGFLCNDRGRCSMGQCVCEP
GWTGPSCDCPLSNATCIDSNGGICNGRGHCECGRCHCHQQSLYTSTICEINYSATHPG
LCEDLRSCVQCQAWGTCEKKGRTCEECNFKVKMVDELKRAEEVVVRCSFRDEDDDCTY
SYTMEGDGAPGPNSTVLVHKKKDCPPGSFNWLIPLLLLLLPLLALLLLLCWKYCACCK
ACLALLPCCNRGHMVGFKEDHYMLRENLMASDHLDTPMLRSGNLKGRDVVRWKVTNNM
QRPGFATHAASTNPTELVPYGLSLRLARLCTENLLKPDTRECAQLRQEVEENLNEVYR
QISGVHKLQQTKFRQQPNAGKKQDHTTVDTVLMAPRSAKPALLKLTEKQVEQRAFHDL
KVAPGYYTLTADQDARGNVEFQEGVELVDVRVFLFIRPEDDDEKQLLVEAIDVPAGTA
TLGRRLVNITIIKEQARDVVSFEQFEFSVSRGDQVARIPVTRRVLDCGKSQVSYRTQD
GTAQENRDYTPVEGELLFQPGEAWKELQVKLLELQEVDSLLRGRQVRRFHVQLSNPKF
GAHLGQPHSTTIIIRDEDELDRSFTSQMLSSQPPFHGDLGAPQNPNAKAAGSRKIHFN
WLPPSGKPMCYRVKYNIQGDSESEAHLLDSKVFSVELTNLYPYCDYEMKVCAYGAQGE
GEYSSLVSCRTHQEVPSEPGRLAFNVVSSTVTQLSWAEPAETNGEITAYEVCYGLVND
DNREIGPMKKVLVDNPKNRMLLIENLRESQFYRYTVKARNGAGWGPEREAIINLATQP
KRPMSIFIIPDIPIVDAQSGEDYDSFLMYSDDVLRSPSGSQRPSVSDDTEHLVNGRMD
FAFPGSTNSLHRNTTTSAAAYGTHLSPHVPHRVLSTSSTLTRDYNSLTRSEHSHSTTL
PRDYSTLTSVSSHDSRLTAGVFDTPTRLVFSALGPTSLRVSWQEPRCERPLQGYSVEY
QLLNGGELHRLNIFNPAQTSVVVEDLLPNHSYVFRVRAQSQEGWGREREGVITIESQV
HPQSPLCPLPGSAFTLSTPSAPGPLVFTALSPDSLQLSWERPRRFNGDIVGYLVTCEM
AQGGGPATAFRVDGDSPESRLTVPGLSENVPYKFKVQARTTEGFGPEREGIITIESQV
GGPFPQLGSRAGLFQHFLQSEYSSITTTHTSATEPFLVDGPTLGAQHLEACGSLTRHV
TQEFVSRTLTTSGTLSTHMDQQFFQT
GENBANK ID: XP_030326.1
VERSION XP_030326.1 GI:14763626

| | |
|---|---|
| 1 | MDKFWWHAAW GLCLVPLSLA QIDLNITCRF AGVFHVEKNG RYSISRTEAA DLCKAFNSTL |
| 61 | PTMAQMEKAL SIGPETCRYG FIEGHVVIPR IHPNSICAAN NTGVYILTSN TSQYDTYCFN |
| 121 | ASAPFEEDCT SVTDLPNAFD GPITITIVNR DGTRYVQKGE YRTNPEDIYP SNPTDDDVSS |
| 181 | GSSSERSSTS GGYIFYTFST VHPIPDEDSE WITDSTDRIP ATTLNSTSAT ATETATKRQE |
| 241 | TWDWPSWLPL PSESKNHLHT TTQMAGTSSN TISAGWEPNE ENEDERDRHL SFSGSGIDDD |
| 301 | EDFISSTIST TPRAFDHTKQ NQDWTQWNPS HSNPEVLLQT TTRMTDVDRN GTTAYEGNWN |
| 361 | PEAHPPLIHH EHHEEEETPH STSTIQATPS STTEETATQK EQWFGNRWHE GYRQTEKEDS |
| 421 | HSTTGTAAAS AHTSHPMQGR TTPSFEDSSW TDFFNPISHP MGRGHQAGRR MDMDSSHSIT |
| 481 | LQPTANPNTG LVEDLDRTGP LSMTTQQSNS QSFSTSHEGL EEDKDHPTTS TLTSSNRNDV |
| 541 | TGGRRDPNHS EGSTTLLEGY TSHYPHTKES RTFIPVTSAK TGSPGVTAVT VGDSNSNVNR |
| 601 | SLSGDQDTFH PSGGSHTTEG SESDGESHGS QEGGANTTSG PIRTEQIPEW LIILASLLAL |
| 661 | ALILAVCIAV NSRRRCGQKK KLVINSGNGA VEDRKPSGLN GEASKSQEMV HLVNKESSET |
| 721 | PDQFMTADET RNLQNVDMKI GV |

GENBANK ID: NP_000826.1
VERSION NP_000826.1 GI:4504129

| | |
|---|---|
| 1 | MGGALGPALL LTSLPGAWAG LGPGQGEQGM TVAVVFSSSG PPQAQFRARL TPQSFLDLPL |
| 61 | EIQPLTVGVN TTNPSSLLTQ ICGLLGAAHV HGIVPEDNVD TEAVAQILDF ISSQTHVPIL |
| 121 | SISGGSAVVL TPKEPGSAFL QLGVSLEQQL QVLFKVLEEY DWSAFAVITS LHPGHALFLE |
| 181 | GVRAVADASH VSWRLLDVVT LELGEGGPRA RTQRLLRQLD APVPVAYCSR EEAEVLFAEA |
| 241 | AQAGLVGPGH VWLVPNLALG STDAPPATFP VGLISVVTES WRLSLRQKVR DGVAILALGA |
| 301 | HSYWRQHGTL PAPAGDCRVH PGPVSPAREA FYRHLLNVTW EGRDPSFSPG GYLVQPTMVV |
| 361 | IALNRHRLWE MVGRWEHGVL YMKYPVWPRY SASLQPVVDS RHLTVATLEE RPPVIVESPD |
| 421 | PGTGGCVPNT VPCRRQSNHT FSSGDVAPYT KLCCKGFCID ILKKLARVVK FSYDLYLVTN |
| 481 | GKHGKRVRGV WNGMIGEVYY KRADMAIGSL TINEERSEIV DPSVPFVETG ISVMVARSNG |
| 541 | TVSPSAFLEP YSPAVWVMMF VMCLTVVAIT VFMFEYPSPV SYNQNLTRGK KSGGPAFTIG |
| 601 | KSVWLLWALV FNNSVPIENP RGTTSKIMVL VWAFFAVIFL ASYTANLAAF MIQEQYIDTV |
| 661 | SGLSDKKPQR PQDQYPPFRF GIVPNGSTER NIRSNYRDMH THMVKFNQRS VEDALTSLKM |
| 721 | GKLDAFIYDA AVLNYMAGKD EGCKLVTIGS GKVPATTGYG IANQKDSHWK RAIDLALLQF |
| 781 | LGDGETQKLE TVWLSGICQN EKNEVMSSKL DIDNMAGVFY MLLVAMGLAL LVFAWEHLVY |
| 841 | WKLRHSVPNS SQLDPLLAFS RGIYSCPSGV QSLASPPRQA SPDLTASSAQ ASVLKNLQAA |
| 901 | RDMVTTAGVS SSLDRATRTI ENWGGGRRAP PPSPCPTPRS GPSPCLPTPD PPPEPSETGW |
| 961 | GPPDGGRAAL VRRAPQPPGR PPTPGPPLSD VSRVSRRPAW EARWPVRTGH CGRELSASER |
| 1021 | PLSPARCHYS SFPRADRSGR PFLPLFPEPP ELEDLPLLGP EQLARREALL HAAWARGSRP |
| 1081 | RHASLPSSVA EAFARPSSLP AGCTGPACAR PDGHSACRRL AQAQSMCLPI YREACQEGEQ |
| 1141 | AGAPAWQHRQ HVCLHAHAHL PFCWGAVCPH LPPCASHGSW LSGAWGPLGH RGRTLGLGTG |
| 1201 | YRDSGGLDEI SSVARGTQGF PGPCTWRRIS SLESEV |

GENBANK ID: CAA43045.1
DEFINITION HUMAN CDW40 MRNA FOR NERVE GROWTH FACTOR RECEPTOR-RELATED
B-LYMPHOCYTE ACTIVATION MOLECULE.
VERSION X60592.1 GI:29850
CDS 48..881
/CODON_START=1

| | |
|---|---|
| 1 | GCCTCGCTCG GGCGCCCAGT GGTCCTGCCG CCTGGTCTCA CCTCGCCATG GTTCGTCTGC |
| 61 | CTCTGCAGTG CGTCCTCTGG GGCTGCTTGC TGACCGCTGT CCATCCAGAA CCACCCACTG |
| 121 | CATGCAGAGA AAAACAGTAC CTAATAAACA GTCAGTGCTG TTCTTTGTGC CAGCCAGGAC |
| 181 | AGAAACTGGT GAGTGACTGC ACAGAGTTCA CTGAAACGGA ATGCCTTCCT TGCGGTGAAA |
| 241 | GCGAATTCCT AGACACCTGG AACAGAGAGA CACACTGCCA CCAGCACAAA TACTGCGACC |
| 301 | CCAACCTAGG GCTTCGGGTC CAGCAGAAGG GCACCTCAGA AACAGACACC ATCTGCACCT |
| 361 | GTGAAGAAGG CTGGCACTGT ACGAGTGAGG CCTGTGAGAG CTGTGTCCTG CACCGCTCAT |
| 421 | GCTCGCCCGG CTTTGGGGTC AAGCAGATTG CTACAGGGGT TTCTGATACC ATCTGCGAGC |
| 481 | CCTGCCCAGT CGGCTTCTTC TCCAATGTGT CATCTGCTTT CGAAAAATGT CACCCTTGGA |
| 541 | CAAGCTGTGA GACCAAAGAC CTGGTTGTGC AACAGGCAGG CACAAACAAG ACTGATGTTG |
| 601 | TCTGTGGTCC CCAGGATCGG CTGAGAGCCC TGGTGGTGAT CCCCATCATC TTCGGGATCC |
| 661 | TGTTTGCCAT CCTCTTGGTG CTGGTCTTTA TCAAAAAGGT GGCCAAGAAG CCAACCAATA |
| 721 | AGGCCCCCCA CCCCAAGCAG GAACCCCAGG AGATCAATTT TCCCGACGAT CTTCCTGGCT |
| 781 | CCAACACTGC TGCTCCAGTG CAGGAGACTT TACATGGATG CCAACCGGTC ACCCAGGAGG |
| 841 | ATGGCAAAGA GAGTCGCATC TCAGTGCAGG AGAGACAGTG AGGCTGCACC CACCCAGGAG |
| 901 | TGTGGCCACG TGGGCAAACA GGCAGTTGGC CAGAGAGCCT GGTGCTGCTG CTGCAGGGGT |
| 961 | GCAGGCAGAA GCGGGGAGCT ATGCCCAGTC AGTGCCAGCC CCTC |

GENBANK ID: AAB59544.1
DEFINITION HUMAN NERVE GROWTH FACTOR RECEPTOR MRNA, COMPLETE CDS.
VERSION M14764.1 GI:189204
CDS 114..1397
/CODON_START=1

| | |
|---|---|
| 1 | GCCGCGGCCA GCTCCGGCGG GCAGGGGGGG CGCTGGAGCG CAGCGCAGCG CAGCCCCATC |
| 61 | AGTCCGCAAA GCGGACCGAG CTGGAAGTCG AGCGCTGCCG CGGGAGGCGG GCGATGGGGG |
| 121 | CAGGTGCCAC CGGCCGCGCC ATGGACGGGC CGCGCCTGCT GCTGTTGCTG CTTCTGGGGG |
| 181 | TGTCCCTTGG AGGTGCCAAG GAGGCATGCC CCACAGGCCT GTACACACAC AGCGGTGAGT |
| 241 | GCTGCAAAGC CTGCAACCTG GGCGAGGGTG TGGCCCAGCC TTGTGGAGCC AACCAGACCG |
| 301 | TGTGTGAGCC CTGCCTGGAC AGCGTGACGT TCTCCGACGT GGTGAGCGCG ACCGAGCCGT |
| 361 | GCAAGCCGTG CACCGAGTGC GTGGGGCTCC AGAGCATGTC GGCGCCGTGC GTGGAGGCCG |
| 421 | ACGACGCCGT GTGCCGCTGC GCCTACGGCT ACTACCAGGA TGAGACGACT GGGCGCTGCG |
| 481 | AGGCGTGCCG CGTGTGCGAG GCGGGCTCGG GCCTCGTGTT CTCCTGCCAG GACAAGCAGA |
| 541 | ACACCGTGTG CGAGGAGTGC CCCGACGGCA CGTATTCCGA CGAGGCCAAC CACGTGGACC |
| 601 | CGTGCCTGCC CTGCACCGTG TGCGAGGACA CCGAGCGCCA GCTCCGCGAG TGCACACGCT |
| 661 | GGGCCGACGC CGAGTGCGAG GAGATCCCTG GCCGTTGGAT TACACGGTCC ACACCCCCAG |
| 721 | AGGGCTCGGA CAGCACAGCC CCCAGCACCC AGGAGCCTGA GGCACCTCCA GAACAAGACC |
| 781 | TCATAGCCAG CACGGTGGCA GGTGTGGTGA CCACAGTGAT GGGCAGCTCC CAGCCCGTGG |
| 841 | TGACCCGAGG CACCACCGAC AACCTCATCC CTGTCTATTG CTCCATCCTG GCTGCTGTGG |
| 901 | TTGTGGGCCT TGTGGCCTAC ATAGCCTTCA AGAGGTGGAA CAGCTGCAAG CAGAACAAGC |
| 961 | AAGGAGCCAA CAGCCGGCCA GTGAACCAGA CGCCCCCACC AGAGGGAGAA AAACTCCACA |
| 1021 | GCGACAGTGG CATCTCCGTG GACAGCCAGA GCCTGCATGA CCAGCAGCCC CACACGCAGA |
| 1081 | CAGCCTCGGG CCAGGCCCTC AAGGGTGACG GAGGCCTCTA CAGCAGCCTG CCCCCAGCCA |
| 1141 | AGCGGGAGGA GGTGGAGAAG CTTCTCAACG GCTCTGCGGG GGACACCTGG CGGCACCTGG |
| 1201 | CGGGCGAGCT GGGCTACCAG CCCGAGCACA TAGACTCCTT TACCCATGAG GCCTGCCCCG |
| 1261 | TTCGCGCCCT GCTTGCAAGC TGGGCCACCC AGGACAGCGC CACACTGGAC GCCCTCCTGG |
| 1321 | CCGCCCTGCG CCGCATCCAG CGAGCCGACC TCGTGGAGAG TCTGTGCAGT GAGTCCACTG |
| 1381 | CCACATCCCC GGTGTGAGCC CAACCGGGGA GCCCCCGCCC CGCCCCACAT TCCGACAACC |
| 1441 | GATGCTCCAG CCAACCCCTG TGGAGCCCGC ACCCCCACCC TTTGGGGGGG GCCCGCCTGG |
| 1501 | CAGAACTGAG CTCCTCTGGG CAGGACCTCA GAGTCCAGGC CCCAAAACCA CAGCCCTGTC |
| 1561 | AGTGCAGCCC GTGTGGCCCC TTCACTTCTG ACCACACTTC CTGTCCAGAG AGAGAAGTGC |
| 1621 | CCCTGCTGCC TCCCCAACCC TGCCCCTGCC CCGTCACCAT CTCAGGCCAC CTGCCCCCTT |
| 1681 | CTCCCACACT GCTAGGTGGG CCAGCCCCTC CCACCACAGC AGGTGTCATA TATGGCGGGC |
| 1741 | CAACACCAGC GATGGTACTA GGGGCAAGTG ACAAGGCCCC AGAGACTGAG AGGGAGGAAT |
| 1801 | CGAGGAACCA GAGCCATGGA CTCTACACTG TGAACTTGGG GAACAAGGGT GGCATCCCAG |
| 1861 | TGGCCTCAAC CCTCCCTCAG CCCCTCTTGC CCCCCACCCC AGCCTAAGAT GAAGAGGATC |
| 1921 | GGAGGCTTGT CAGAGCTGGG AGGGGTTTTC GAAGCTCAGC CCACCCCCCT CATTTTGGAT |
| 1981 | ATAGGACAGT GAGGCCCAGG GAGAGGGCAT GATTCGCCCA AAGCCAGACA GCAACGGGGA |
| 2041 | GGCCAAGTGC AGGCTGGCAC CGCCTTCTCT AAATGAGGGG CCTCAGGTTT GCCTGAGGGC |
| 2101 | GAGGGGAGGG TGGCAGGTGA CCTTCTGGGA AATGGCTTGA AGCCAAGTCA GCTTTGCCTT |
| 2181 | CCACGCTGTC TCCAGACCCC CACCCCTTCC CCACTGCCTG CCCACCCGTG GAGATGGGAT |
| 2221 | GCTTGCCTAG GGCCTGGTCC ATGATGGAGT CAGGTTTGGG GTTCGTGGAA AGGGTGCTGC |
| 2281 | TTCCCTCTGC CTGTCCCTCT CAGGCATGCC TCTGTGACAT CAGTGGCATG GCTCCAGTCT |
| 2341 | GCTGCCCTCC ATCCCGACAT GGACCCGGAG CTAACACTGG CCCCTAGAAT CAGCCTAGGG |
| 2401 | GTCAGGGACC AAGGACCCCT CACCTTGCAA CACACAGACA CACGCACACA CACACACAGG |
| 2461 | AGGAGAAATC TCACTTTTCT CCATGAGTTT TTTCTCTTGG GCTGAGACTG GATACTGCCC |
| 2521 | GGGGCAGCTG CCAGAGAAGC ATCGGAGGGA ATTGAGGTCT GCTCGGCCGT CTTCACTCGC |
| 2581 | CCCCGGGTTT GGCGGGCCAA GGACTGCCGA CCGAGGCTGG AGCTGGCGTC TGTCTTCAAG |
| 2841 | GGCTTACACG TGGAGGAATG CTCCCCCATC CTCCCCTTCC CTGCAAACAT GGGGTTGGCT |
| 2701 | GGGCCCAGAA GGTTGCGATG AAGAAAAGCG GGCCAGTGTG GGAATGCGGC AAGAAGGAAT |
| 2761 | TGACTTCGAC TGTGACCTGT GGGGATTTCT CCCAGCTCTA GACAACCCTG CAAAGGACTG |
| 2821 | TTTTTTCCTG AGCTTGGCCA GAAGGGGGCC ATGAGGCCTC AGTGGACTTT CCACCCCCTC |
| 2881 | CCTGGCCTGT TCTGTTTTGC CTGAAGTTGG AGTGAGTGTG GCTCCCCTCT ATTTAGCATG |
| 2841 | ACAAGCCCCA GGCAGGCTGT GCGCTGACAA CCACCGCTCC CCAGCCCAGG GTTCCCCCAG |
| 3001 | CCCTGTGGAA GGGACTAGGA GCACTGTAGT AAATGGCAAT TCTTTGACCT CAACCTGTGA |
| 3061 | TGAGGGGAGG AAACTCACCT GCTGGCCCCT CACCTGGGCA CCTGGGGAGT GGGACAGAGT |
| 3121 | CTGGGTGTAT TTATTTTCCT CCCCAGCAGG TGGGGAGGGG GTTTGGTGGC TTGCAAGTAT |
| 3181 | GTTTTAGCAT GTGTTTGGTT CTGGGGCCCC TTTTTACTCC CCTTGAGCTG AGATGGAACC |
| 3241 | CTTTTGGCCC CCAGCTGGGG GCCATGAGCT CCAGACCCCC AGCAACCCTC CTATCACCTC |
| 3301 | CCCTCCTTGC CTCCTGTGTA ATCATTTCTT GGGCCCTCCT GAAACTTACA CACAAAACGT |
| 3361 | TAAGTGATGA ACATTAAATA GCAAAG |

GENEANK ID: NP_002502.1
VERSION NM_002511.1 GI:4505406
CDS 140..1312
/CODON_START=1

| | |
|---|---|
| 1 | GTGCTGTGAG GCTTGCCCGC GGACAGTAAA CTTGCAGGGG CGAGAGGGAG GGACATCGAT |
| 61 | TAAACCTAAA TCGTGGGCGT TCAGTCCTCA GGGCACCGAG CGCGTGAAAA CTCCAGCGGA |
| 121 | CTCTGCTGGA AAGGAGATCA TGCCCTCTAA GTCTCTTTCC AACCTCTCGG TGACCACCGG |
| 181 | CGCGAATGAG AGCGGTTCCG TTCCCGAGGG GTGGGAAAGG GATTTCCTGC CGGCCTCGGA |
| 241 | CGGGACCACC ACGGAGTTGG TGATCCGCTG TGTGATCCCG TCCCTCTACC TGCTCATCAT |
| 301 | CACCGTGGGC TTGCTGGGCA ACATCATGCT GGTGAAGATC TTCATCACCA ACAGCGCCAT |
| 361 | GAGGAGCGTC CCCAACATCT TCATCTCTAA CCTGGCGGCC GGGGACTTGC TGCTGCTGCT |
| 421 | CACCTGCGTC CCGGTGGACG CCTCGCGCTA CTTCTTCGAC GAGTGGATGT TTGGCAAGGT |
| 481 | GGGCTGCAAA CTGATCCCTG TCATCCAGCT CACTTCCGTG GGGGTTTCCG TGTTCACTCT |
| 541 | CACTGCCCTC AGCGCCGACA GGTACAGAGC CATCGTTAAC CCCATCGACA TGCAGACGTC |
| 601 | AGGGCCATTG CTGCGGACCT GTGTGAAGGC CATGGGTATC TGGGTGGTCT CCGTGTTGCT |
| 661 | GGCAGTTCCC GAAGCGGTGT TTTCAGAAGT GGCTCGCATC AGTAGCTTGG ATAATAGCAG |
| 721 | CTTCACAGCA TGTATCCCAT ACCCTCAAAC AGATGAATTA CATCCAAAGA TTCATTCAGT |
| 781 | GCTCATTTTC TTGGTCTATT TCCTCATACC ACTTGCTATT ATTAGCATTT ATTATTATCA |
| 841 | TATTGCAAAG ACCTTAATTA AAAGCGCACA CAATCTTCCT GGAGAATACA ATGAACATAC |
| 901 | CAAAAAACAG ATGGAAACAC GGAAACGCCT GGCTAAAATT GTGCTTGTCT TTCTGGGCTG |
| 981 | TTTCATCTTC TGTTGGTTTC CAAACCACAT CCTTTACATG TATCGGTCTT TCAACTATAA |
| 1021 | TGAGATTGAT CCATCTCTAG GCCACATGAT TGTCACCTTA GTTGCCCGGG TTCTCAGTTT |
| 1081 | TGGCAATTCT TGTGTCAACC CATTTGCTCT TTACCTACTC AGTGAAAGCT TCAGGAGGCA |
| 1141 | TTTCAACAGC CAACTCTGCT GTGGGAGGAA GTCCTATCAA GAGAGAGGAA CCAGCTACCT |
| 1201 | ACTCAGCTCT TCAGCGGTGC GTATGACATC TCTGAAAAGC AATGCTAAGA ACATGGTGAC |
| 1261 | CAATTCTGTT TTACTAAATG GGCACAGCAT GAAGCAGGAA ATGGCAATCT GATTTTGGCC |
| 1321 | ATTCAACTCA CTACCTGGAG AGAACTTAGT AA |

GENBANK ID: Q00941
EST
DNA TYPE: CDNA
CGAAGGCGCGGCGGGCTCGGGGGCGGAGAACCTGACCTGCGAGATCCGAGCCGAGCGCTT
TCTTTTCTGCGCGTGGCGGGAGGGGCCAGCGGCGCCCGCGGACGTCCGGTACTCGCTGCG
AGTCCTTAACTCCACGGGTCACGACGTGGCGCGATGCATGGCCGACCCTGGGGATGACGT
CATGACACAGTGCATTGCGAACGACTTGTCACTGATGGGGAGTGAGGCCTACTTGGTCGT
GACCGGTCGCACCGGAGCGGGGCCAGTGCGGATCCTGGACGACTTGGTGGCTACGAAGGC
GCTCGACCGACTCGATCCCTCACCTGACGTCACCGAGTCCTGTAACTATTCCCACTGCAC
CGAGTCGTGGGCGCCGCCCTAGACCTGTGCATCCTATGAGGTGCGGGACTTGCAGTGTGA
GGTCCAGTGGCAGAGCACATATCCAGGAAGCTCACTCCAGAATGTGCTCATCCGCGAGGA
GAGGCGGTTTGCCTTTCGCACGCTGTTCCGCTCGAGGTTACATTGCTAAAGTGCGCACAG
GGTACACGAGGATGAGCACTGTGGCGAATGGTATAAGCGGCATCCTGTTATGGCTGAG
GENBANK ID: P05106
EST
DNA TYPE: CDNA
CGGCCGCTGCACAGCAGCCCATTGCTGGACATGCAGGTGTCAGTACGCGTGGTACAGTTG
CAGTAGTAGCCGGTCCAGTCGGAGTCACACAGGCAGTCCCCACAGCTGCACTGGCCATGG
CCTGAGCACATCTCCCCCTTGTAGCGGACACAGGAGAAGTCGTCACACTCGCAGTACTTG
CCCGTGATCTTGCCAAAGTCACTGCTGTGGCAGACACATTGACCACAGAGGCACTCGCCC
CGCTGGCTGCAGACGGGCTGACCCTCTCGGGGGCTGCACTCGTCCTGCTGGGAAGGGCGA
TAGTCCTCCTCTGAGCACTCACACTGGGATCCCAGCCAGCCAGGCCCACAACGGCATACC
CCACACTCAAAGGTCCCATTGCCATTGTTGCAGCGATGGCTATTAGGTTCAGCTTGGGCC
TGGCAGGCACAGTCACAATCAAAGGTGACCTGGACGATCAGGCTGTCCTTGAAGCCCACG
GGCTTTATGGTAAAGGACTTCTCCTTCTCCTGGGGACAGCCTCGCACCTTGGCCTCAATG
CTGAAGCTCACCGTGTCTCCAATCTTGAGTCCCATACAAGACTTGAGGCCAGGGATGACC
TCATTGGTGAGGCAGGT
EST GENBANK ACC: BF115658
DNA TYPE: CDNA
GCGGCCGCTGCACAGCAGCCCATTGCTGGACATGCAGGTGTCAGTACGCGTGGTACAGTT
GCAGTAGTAGCCGGTCCAGTCGGAGTCACACAGGCAGTCCCCACAGCTGCACTGGCCATG
GCCTGAGCACATCTCCCCCTTGTAGCGGACACAGGAGAAGTCGTCACACTCGCAGTACTT
GCCCGTGATCTTGCCAAAGTCACTGCTGTGGCAGACACATTGACCACAGAGGCACTCGCC
CCGCTGGCTGCAGACGGGCTGACCCTCCCGGGGGCTGCATTCGTCCTGCTGGGAAGGGCG
ATAGTCCTCCTCTGAGCACTCACACTGGGATCCCAGCCAGCCAGGCCCACAACGGCATAC
CCCACACTCAAAGGTCCCATTGCCATTGTTGCAGCGATGGCTATTAGGTTCAGCTTGGGC
CTGGCAGGCACAGTCACAATCAAAGGTGACCTGNACGATCAGGCTGTCCTTGAAGCCCAC
GGGCTNTATGGTAAAGGACTTCTCCTTCTCCTGGGGACAGCCTCGCACCTTGGCCTCAAT
GCTGAAGCTCACCGTGTCTCCAATCTTGAGTCCCATACAAGACTTGAGGCCAGGGATGAC
CTCATTGTTGAGGCATGTGGCATTGAAGGATAGAGANCACTCTTCAGGACGTCACGCACT
TTCAGCTCGACTTTAGAACGGAATTTCCATAAGCATCAACAATGAGCCTGAGGACATTGC
CTGAATCCATGGACAGAACCCCCACTGTGGTCCC
EST
GENBANK ACC: BFD62996
CGGCCGCTGCACAGCAGCCCATTGCTGGACATGCAGGTGTCAGTACGCGTGGTACAGTTG
CAGTAGTAGCCGGTCCAGTCGGAGTCACACAGGCAGTCCCCACAGCTGCACTGGCCATGG
CCTGAGCACATCTCCCCCTTGTAGCGGACACAGGAGAAGTCGTCACACTCGCAGTACTTG
CCCGTGATCTTGCCAAAGTCACTGCTGTGGCAGACACATTGACCACAGAGGCACTCGCCC
CGCTGGCTGCAGACGGGCTGACCCTCCCGGGGGCTGCATTCGTCCTGCTGGGAAGGGCGA
TAGTCCTCCTCTGAGCACTCACACTGGGATCCCAGCCAGCCAGGCCCACAACGGCATACC
CCACACTCAAAGGTCCCATTGCCATTGTTGCAGCGATGGCTATTATGTTCAGCTTGGGCC
TGGCAGGCACAGTCACAATCAAAGGTGACCTGGACGATCAGGCTGTCCTTGAAGCCCACG
GGCTTTATGGTAAAGGAATTCTCCTTTTCCTTGGGACAGACTCGCACCTTGGCCCTAATG
CTGAAGCTCACCGAGATCTTCAT
GENBANK ID: CAA52348.1
VERSION X74295.1 GI:437781
CDS <1..234
/CODON_START=1

| | |
|---|---|
| 1 | AAGATGGGAT TCTTCAAACG GGCGAAGCAC CCCGAGGCCA CCGTGCCCCA GTACCATGCG |
| 61 | GTGAAGATTC CTCGGGAAGA CCGACAGCAG TTCAAGGAGG AGAAGACGGG CACCATCCTG |
| 121 | AGGAACAACT GGGGCAGCCC CCCGCCGGAC GGCCCGGATG CACACGCCAT CCTCGCTGCT |
| 181 | GACGGGCATC CCCAGCTGGG CCCCAATGGG CATCCAGGGC CAGGCACCGC CTAGGTTCCC |
| 241 | ATGTCCCAGC CTGCGCTGTG GCTGCCCTCC ATCCCTTCCC CAGAGATGGC TCCTTGGGAT |
| 301 | GAAGAGGGTA GAGTCGGCTG CTGGTGTCAC ATCAAGAATT TGGCAGGATC GGCTTCCTCA |
| 361 | GGGGCACAGA CCTCTCCCAC CCACAAGAAC TGCTGCCACG CAACTTCCCC TTAGAGTGCT |
| 421 | GTGAGATGAG AGTGGGTAAA TCAGGGACAG GGCCATGGGG TAGGGTGAGA AGGGCAGGGG |
| 481 | TGTCCTGATG CAAAGGTGGG GAGAAGGATC CTAATCCCTT CCTCTCCCAT TCACCCTGTG |
| 541 | TAACAGGACC CCAAGGACCT GCCTCCCCGG AAGTGCCTTA ACCTAGAGGG TCGGGGAGGA |
| 601 | GGTTGTGTCA CTGACTCAAG GCTGCTCCTT CTCTAGTTTC CCCTCTCATC TGACCTTAGT |
| 661 | TTGCTGCCAT CAGTCTAGTG GTTTCGTGGT TTCGTCTATT TATTAAAAAA TCGGAACCC |

GENBANK ID: M57627
VERSION CAA51942.1 GI:580177

| | |
|---|---|
| 1 | MHSSAL |

GENBANK ID: AAA52578.1
VERSION AAA52578.1 GI:183364

| | |
|---|---|
| 1 | MWLQSLLLLG TVACSISAPA RSPSPSTQPW EHVNAIQEAR RLLNLSRDTA AEMNETVEVI |
| 61 | SEMFDLQEPT CLQTRLELYK QGLRGSLTKL KGPLTMMASH YKQRCPPTPE TSCATQIITF |
| 121 | ESFKENLKDF LLVIPFDCWE PVQE |

GENBANK ID: AAA58482.1
VERSION AAA58482.1 GI:182669

| | |
|---|---|
| 1 | METNFSIPLN ETEEVLPEPA GHTVLWIFSL LVHGVTFVFG VLGNGLVIMV AGFRMTRTVN |
| 61 | TICYLNLALA DFSFSAILPF RNVSVANREK WPFASFLCKL VHVNIDINLF VSVYLITIIA |
| 121 | LDRCICVLHP AWAQNHRTMS LAKRVMTGLW IFTIVLTLPN FIFNTTISTT NGDTYCIFNF |
| 181 | AFWGDTAVER LNVFITNAKV FLILHFIIGF TVPMSIITVC YGIIAAKIHR NHMIKSSRPL |
| 241 | RVFAAVVASF FICWFPYELI GILMAVWLKE NLLNGKYKII LVLINPTSSL AFFNSCLNPI |
| 301 | LYVFMGRNFQ ERLIRSLPTS LERALTEVPD SAQTSNTHTT SASPPEETEL QAM |

GENBANK ID: P17774
VERSION P17774 GI:121324

| | |
|---|---|
| 1 | MSESLVVCDV AEDLVEKLRK FRFRKETNNA ATINKIDMDK RLVVLDEELE GISPDELKDE |
| 61 | LPERQPRFIV YSYKYQHDDG RVSYPLCFIF SSPVGCKPEQ QMMYAGSKNK LVQTAELTKV |
| 121 | FEIRNTEDLT EEWLREKLGF FH |

GENBANK ID: P51858
VERSION P51858 GI:1708157

| | |
|---|---|
| 1 | MSRSNRQKEY KCGDLVFAKM KGYPHWPARI DEMPEAAVKS TANKYQVFFF GTHETAFLGP |
| 61 | KDLFPYEESK EKFGKPNKRK GFSEGLWEIE NNPTVKASGY QSSQKKSCVE EPEPEPEAAE |
| 121 | GDGDKKGNAE GSSDEEGKLV IDEPAKEKNE KGALKRRAGD LLEDSPKRPK EAENPEGEEK |
| 181 | EAATLEVERP LPNEVEKNST PSEPGSGRGP PQEEEEEEDE EEEATKEDAE APGIRDHESL |
| 241 | |

GENBANK ID: P10147
VERSION P10147 GI:127078

| | |
|---|---|
| 1 | MQVSTAALAV LLCTMALCNQ FSASLAADTP TACCFSYTSR QIPQNFIADY FETSSQCSKP |
| 61 | GVIFLTKRSR QVCADPSEEW VQKYVSDLEL SA |

GENBANK ID: P13500
VERSION P13500 GI:126842

| | |
|---|---|
| 1 | MKVSAALLCL LLIAATFIPQ GLAQPDAINA PVTCCYNFTN RKISVQRLAS YRRITSSKCP |
| 61 | KEAVIFKTIV AKEICADPKQ KNVQDSMDHL DKQTQTPKT |

GENBANK ID: NP_065391.1
VERSION NP_065391.1 GI:10092621

| | |
|---|---|
| 1 | MGVLLTQRTL LSLVLALLFP SMASMAAIGS CSKEYRVLLG QLQKQTDLMQ DTSRLLQPYI |
| 61 | RIQGLDVFKL REHCRERPGA FPSEETLRGL GRRGFLQTLN ATLGCVLHRL ADLEQRLFKA |
| 121 | QDLERSGLNI EDLEKLQMAR FNILGLRNNI YCMAQLLDNS DTAEPTKAGR DASQPPTPTP |
| 181 | ASDAFQRKLE GCRFLHGYHR FMESVGRVFS KWGESFNRSR RHSPHQALRK GVRRTRPSRK |
| 241 | GKRLMTRGQL PR |

GENBANK ID: XP_013053.3
VERSION XP_013053.3 GI:14768277

| | |
|---|---|
| 1 | MERERETLQA WEERVGQELD RVVAFWNEHS HDQEEGGFFT CLGREGRVYD DLKYVWLQGR |
| 61 | QVWMYCRLYR TFERFRHAQL LDAAKAGGEF LLRYARVAPP GKKCAFVLTR DGRPVKVQRT |
| 121 | IFSECFYTMA MNELWRATGE VRYQTEAVEM MDQIVHWVQE DASGLGRPQL QGAPAAEPMA |
| 181 | VPMNLLNLVE QLGEADEELA GKYAELGDWC ARRILQHVQR DGQAVLENVS EGGKELPGCL |
| 241 | GRQQNPGHTL EAGWFLLRHC IRIGDPELRA HVIDKWLLLP FHSGWDPDHG GLFYFQDADN |
| 301 | FCPTQLEWAN KLWWPHSEAM IAFLMGYSDS GDPVLLRLFY QVAEYTFRQF RDPEYGENFG |
| 361 | YLSREGKVAL SIKGGPFKGC FHVPRCLAMC EEMLGALLSR PAPAPSPAPT PACRGAE |

GENBANK ID: B31848
VERSION B31848 GI:87005

| | |
|---|---|
| 1 | MTCKNSQLER NIETIINTFH QYSVKLGEPD TLNQGEFKEL VRKDLQNFLK KENKNEKVIE |
| 61 | HIMEDLDTNA DKQLSFEEFI MLMARLTWAS HENNEEGDEG PGHHHKPGLG ECTP |

GENBANK ID: CAA38698.1
VERSION CAA38698.1 GI:35522

| | |
|---|---|
| 1 | MPVNRLFPCF LQLLAGLALP AVFFQQWALS AGNGSSEVEV VFFQEVWGRS YCRALERLVD |
| 61 | VVSEYPSEVE HMFSFSCVSL LRCTGCCGDE NLHCVPVETA NVTMQLLKIR SGDRPSYVEL |
| 121 | TFSQHVRCEC RPLREKMKPE RCGDAVPRR |

GENBANK ID: AAA35789.1
VERSION AAA35789.1 GI:181971

| | |
|---|---|
| 1 | MNFLLSWVHW SLALLLYLHH AKWSQAAPNA EGGGQNHHEV VKFMDVYQRS YCHFIETLVD |
| 61 | IFQEYPDEIE YIFKPSCVFL NRCGGCCNDE GLECVPTEES NITMQINRIK PHQGQHIGEM |
| 121 | SFLQHNKCEC RPKKDRARQE NPCGPCSERR KHLFVQDPQT CKCSCKNTDS RCKARQLELN |
| 181 | ERTCRCDKPR R |

GENBANK ID: AAA66062.1
VERSION AAA66062.1 GI:536898

| | |
|---|---|
| 1 | MWKRWLALAL ALVAVAWVRA EEELRSKSKI CANVFCGAGR ECAVTEKGEF TCLCIEQCKP |
| 61 | HKRFVCGSNG KTYLNHCELH RDACLTGSKI QVDYDGHCKE KKSVSPSASP VVCYQSNRDE |
| 121 | LRRRIIQWLE AEIIFDGWFS KGSNYSEILD KYFKNFDNGD SRLDSSEFLK FVEQNETAIN |
| 181 | ITTYPDQENN KLLRGLCVDA LIELSDENAD WKLSFQEFLK CLNPSFNPPE KKCALEDETY |
| 241 | ADGAETEVDC NRCVCACGNW VCTANTCDGK NQKGAQTQTE EEMTRYVQEL QKHQETAEKT |
| 301 | KRVSTKEI |

GENBANK ID: AAA59872.1
VERSION AAA59872.1 GI:398038

| | |
|---|---|
| 1 | MGWLPLLLLL TQCLGVPGQR SPLNDFQVLR GTELQHLLHA VVPGPWDEDV ADAEECAGRC |
| 61 | GPLMDCRAFH YNVSSHGCQL LFWTQRSPHT RLRRSGRCDL FQKKDYVRTC IMNNGVGYRG |
| 121 | TMATTVGGLP CQAWSHKFPN DHKYTFTLRN GLEENFCRNP DGDPGGFWCY TTDPAVRFQS |
| 181 | CGIKSCREAA CVWCNGEEYR GAVDRTESGR ECQRWQLQHP HQHPFEPGKF LDQGLDDNYC |
| 241 | RNPDGSERPW CYTTDPQIER EFCDLFRCGS EAQFRQEATT VSCFRGKGEG YRGTANTTTA |
| 301 | GVPCQRWDAQ IFHQHRFTPE KYACKDLREN FCRNPDGSEA PWCFTLRPGM RAAFCYQIRR |
| 361 | CTDDVRPQDC YHGAGEQYRG TVSKTRKGVQ CQRWSAETPH KPQFTFTSEP HAQLEENFCR |
| 421 | NPDGDSHGPW CYTMDPRTPF DYCALRRCAD DQPPSILDPP DQVQFENCGK RVDRLDQRRS |
| 481 | KLRVVGGHPG NSFWTVSLRN RQGQHFCGGS LVKEQWILTA RQCFSSCHMP LTGYEVWLGT |
| 541 | LFQNPQHGEP SLQRVPVAKM VCGPSGSQLV LLKLERSVTL NQRVALICLP PEWYVVFFGT |
| 601 | KCEIAGWGET KGTGNDTVLN VAFLNVTSNQ ECNIKHRGRV RESENCTEGL LADVGACEGD |
| 661 | YGGPLACFTH NCWVLEGIII PNRVCARSRW PAVFTRVSVF VDWIHKVMRL G |

GENBANK ID: P01579
VERSION P01579 GI:124479

| | |
|---|---|
| 1 | MKYTSYILAF QLCIVLGSLG CYCQDPYVKE AENLKKYFNA GHSDVADNGT LFLGILKNWK |
| 61 | EESDRKIMQS QIVSFYFKLF KNFKDDQSIQ KSVETIKEDM NVKFFNSNKK KRDDFEKLTN |
| 121 | YSVTDLNVQR KAIHELIQVM AELSPAAKTC KRKRSQMLFR GRRASQ |

GENBANK ID: XP_035842.1
DEFINITION HOMO SAPIENS SMALL INDUCIBLE CYTOKINE A5 (RANTES) (SCYAS),
MRNA.
CDS 22..297
/CODON_START=1

| | |
|---|---|
| 1 | ACAGCCTCTC CCACAGGTAC CATGAAGGTC TCCGCGGCAG CCCTCGCTGT CATCCTCATT |
| 61 | GCTACTGCCC TCTGCGCTCC TGCATCTGCC TCCCCATATT CCTCGGACAC CACACCCTGC |
| 121 | TGCTTTGCCT ACATTGCCCG CCCACTCCCC CGTGCCCACA TCAAGGAGTA TTTCTACACC |
| 181 | AGTGGCAAGT GCTCCAACCC AGCAGTCGTC TTTGTCACCC GAAAGAACCG CCAAGTGTGT |
| 241 | GCCAACCCAG AGAAGAAATG GGTTCGGGAG TACATCAACT CTTTGGAGAT GAGCTAGGAT |
| 301 | GGAGAGTCCT TGAACCTGAA CTTACACAAA TTTGCCTGTT TCTGCTTGCT CTTCTCCTAG |
| 361 | CTTGGGAGGC TTCCCCTCAC TATCCTACCC CACCCGCTCC TTGAAGGGCC CAGATTCTAC |
| 421 | CACACAGCAG CAGTTACAAA AACCTTCCCC AGCCTGGACC TGGTGGCTCA CGCCTGTAAT |
| 481 | CCCAGCACTT TGGGAGGGCA AGGTGGGTGG ATCACTTGAG GTCAGGAGTT CGAGACCAGC |
| 541 | CTGGCCAACA TGATGAAACC CCATCTCTAC TAAAAATACA AAAAATTAGC CGGGCGTGGT |
| 601 | AGCGGGCGCC TGTAGTCCCA GCTACTCGGG AGGCTGAGGC AGGAGAATGG CGTGAACCCG |
| 661 | GGAGGCGGAG CTTGCAGTGA GCCGAGATCG CGCCACTGCA CTCCAGCCTG GGCGACAGAG |
| 721 | CGAGACTCCG TCTCAAAAAA AAAAAAAAAA AAAAAAATAC AAAAATTAGC CGGGCGTGGT |
| 781 | GGCCCACGCC TGTAATCCCA GCTACTCGGG AGGCTAAGGC AGGAAAATTG TTTGAACCCA |
| 841 | GGAGGTGGAG GCTGCAGTGA GCTGAGATTG TGCCACTTCA CTCCAGCCTG GGTGACAAAG |
| 901 | TGAGACTCCG TCACAACAAC AACAACAAAA AGCTTCCCCA ACTAAAGCCT AGAAGAGCTT |
| 961 | CTGAGGCGCT GCTTTGTCAA AAGGAAGTCT CTAGGTTCTG AGCTCTGGCT TTGCCTTGGC |
| 1021 | TTTGCCAGGG CTCTGTGACC AGGAAGGAAG TCAGCATGCC TGTAGAGGCA AGGAGGGGAG |
| 1081 | GAACACTGCA CTCTTAAGCT TCCGCCGTCT CAACCCCTCA CAGGAGCTTA CTGGCAAACA |
| 1141 | TGAAAAATCG G |

GENBANK ID: CAA72079.1
DEFINITION H. SAPIENS MRNA FOR ESTROGEN SULFOTRANSFERASE.
CDS 63..947
/CODON_START=1

| | |
|---|---|
| 1 | GCCTTGAAGA GATATAAACT AGATCAATTT CTTTCACAGG ATCAACTAAA CAGTGTACCA |
| 61 | CAATGAATTC TGAACTTGAC TATTATGAAA AGTTTGAAGA AGTCCATGGG ATTCTAATGT |
| 121 | ATAAAGATTT TGTCAAATAT TGGGATAATG TGGAAGCGTT CCAGGCAAGA CCAGATGATC |
| 181 | TTGTCATTGC CACCTACCCT AAATCTGGTA CAACCTGGGT TAGTGAAATT GTGTATATGA |
| 241 | TCTATAAAGA GGGTGATGTG GAAAAGTGCA AAGAAGATGT AATTTTTAAT CGAATACCTT |
| 301 | TCCTGGAATG CAGAAAAGAA AACCTCATGA ATGGAGTAAA ACAATTAGAT GAGATGAATT |
| 361 | CTCCTAGAAT TGTGAAGACT CATTTGCCAC CTGAACTTCT TCCTGCCTCA TTTTGGGAAA |
| 421 | AGGATTGTAA GATAATCTAT CTTTGCCGGA ATGCAAAGGA TGTGGCTGTT TCCTTTTATT |
| 481 | ATTTCTTTCT AATGGTGGCT GGTCATCCAA ATCCTGGATC CTTTCCAGAG TTTGTGGAGA |
| 541 | AATTCATGCA AGGACAGGTT CCTTATGGTT CCTGGTATAA ACATGTAAAA TCTTGGTGGG |
| 601 | AAAAGGGAAA GAGTCCACGT GTACTATTTC TTTTCTACGA AGACCTGAAA GAGGATATCA |
| 661 | GAAAAGAGGT GATAAAATTG ATACATTTCC TGGAAAGGAA GCCATCAGAG GAGCTTGTGG |
| 721 | ACAGGATTAT ACATCATACT TCGTTCCAAG AGATGAAGAA CAATCCATCC ACAAATTACA |
| 781 | CAACACTGCC AGACGAAATT ATGAACCAGA AATTGTCGCC CTTCATGAGA AAGGGAATTA |
| 841 | CAGGAGACTG GAAAAATCAC TTTACAGTAG CCCTGAATGA AAAATTTGAT AAACATTATG |
| 901 | AGCAGCAAAT GAAGGAATCT ACACTGAAGT TTCGAACTGA GATCTAAGAA GGTCTT |

GENBANK ID: AAA63210.1
DEFINITION HUMAN KERATINOCYTE GROWTH FACTOR MRNA, COMPLETE CDS.
CDS 446..1030
/CODON_START=1

| | |
|---|---|
| 1 | ACGCGCTCAC ACACAGAGAG AAAATCCTTC TGCCTGTTGA TTTATGGAAA CAATTATGAT |
| 61 | TCTGCTGGAG AACTTTTCAG CTGAGAAATA GTTTGTAGCT ACAGTAGAAA GGCTCAAGTT |
| 121 | GCACCAGGCA GACAACAGAC ATGGAATTCT TATATATCCA GCTGTTAGCA ACAAAACAAA |
| 181 | AGTCAAATAG CAAACAGCGT CACAGCAACT GAACTTACTA CGAACTGTTT TTATGAGGAT |
| 241 | TTATCAACAG AGTTATTTAA GGAGGAATCC TGTGTTGTTA TCAGGAACTA AAAGGATAAG |
| 301 | GCTAACAATT TGGAAAGAGC AAGTACTCTT TCTTAAATCA ATCTACAATT CACAGATAGG |
| 361 | AAGAGGTCAA TGACCTAGGA GTAACAATCA ACTCAAGATT CATTTTCATT ATGTTATTCA |
| 421 | TGAACACCCG GAGCACTACA CTATAATGCA CAAATGGATA CTGACATGGA TCCTGCCAAC |
| 481 | TTTCCTCTAC AGATCATGCT TTCACATTAT CTGTCTAGTG GGTACTATAT CTTTAGCTTG |
| 541 | CAATGACATG ACTCCAGAGC AAATGGCTAC AAATGTGAAC TGTTCCAGCC CTGAGCGACA |
| 601 | CACAAGAAGT TATGATTACA TGGAAGGAGG GGATATAAGA GTGAGAAGAC TCTTCTGTCG |
| 661 | AACACAGTGG TACCTGAGGA TCGATAAAAG AGGCAAAGTA AAAGGGACCC AAGACATGAA |
| 721 | GAATAATTAC AATATCATGG AAATCAGGAC AGTGGCAGTT GGAATTGTGG CAATCAAAGG |
| 781 | GGTGGAAAGT GAATTCTATC TTGCAATGAA CAAGGAAGGA AAACTCTATG CAAAGAAAGA |
| 841 | ATGCAATGAA GATTGTAACT TCAAAGAACT AATTCTGGAA AACCATTACA ACACATATGC |
| 901 | ATCAGCTAAA TGGACACACA ACGGAGGGCA AATGTTTCTT GCCTTAAATC AAAAGCCCAT |
| 961 | TCCTGTAAGA GGAAAAAAAA CGAAGAAAGA ACAAAAAACA GCCCACTTTC TTCCTATGGC |
| 1021 | AATAACTTAA TTGCATATGG TATATAAAGA ACCCAGTTCC AGCAGGGAGA TTTCTTTAAG |
| 1081 | TGGACTGTTT TCTTTCTTCT CAAAATTTTC TTTCCATTTA TTTTTTAGTA ATCAAGAAAG |
| 1141 | GCTGGAAAAA CTACTGAAAA ACTGATCAAG CTGGACTTGT GCATTTATGT TTGTTTTAAG |
| 1201 | ACACTGCATT AAAGAAAGAT TTGAAAAGTA TACACAAAAA TCAGATTTAG TAACTAAAGG |
| 1261 | TTGTAAAAAA TTGTAAAACT GGTTGTACAA TCATGATGTT AGTAACACTA ATTTTTTTCT |
| 1321 | TAAATTAATT TACCCTTAAG AGTATGTTAG ATTTGATTAT CTGATAATGA TTATTTAAAT |
| 1381 | ATTCCTATCT GCTTATAAAA TGGCTGCTAT AATAATAATA ATACAGATGT TGTTATATAA |
| 1441 | CCTATATCAG ACCTACAGGC TTCTGGCAGG ATTTGTCAGA TAATCAACCC ACACTAACTA |
| 1501 | TCGAAAATGA GCAGCATTTT AAATGCTTTC TAGTGAAAAA TTATAATCTA CTTAAACTCT |
| 1561 | AATCAGAAAA AAAATTCTCA AAAAAACTAT TATGAAAGTC AATAAAATAG ATAATTTAAC |
| 1621 | AAAAGTACAG GATTAGAACA TGCTTATACC TATAAATAAG AACAAAATTT CTAATCCTGC |
| 1681 | TCAAGTGGAA AGGGTATTGC TAAAAGGATG TTTCCAAAAA TCTTGTATAT AAGATAGCAA |
| 1741 | CAGTGATTGA TGATAATACT GTACTTCATC TTACTTGCCA CAAAATAACA TTTTATAAAT |
| 1801 | CCTCAAAGTA AAATTGAGAA ATCTTTAACT TTTTTTCAAC TAACATAATC TATCTTTGTA |
| 1861 | TAATTCATAT TTGGGAATAT GGCTTTTAAT AATGTTCTTC CCACAAATAA TCATGCTTTT |
| 1921 | TTCCTATGGT TACAGCATTA AACTCTATTT TAAGTTGTTT TTGAACTTTA TTGTTTTGTT |
| 1981 | ATTTAAGTTT ATGTTATTTA TAAAAAAAAA ACCTTAATAA GCTGTATCTG TTTCATATGC |
| 2041 | TTTTAATTTT AAAGGAATAA CAAAACTGTC TGGCTCAACG GCAAGTTTCC CTCCCTTTTC |
| 2101 | TGACTGACAC TAAGTCTACC ACACAGCACT TGGGCCAGCA AATCCTCGAA GCAGACAAAA |
| 2161 | ATAAGAGCCT GAAGCAATGC TTACAATAGA TGTCTCACAC AGAACAATAC AAATATGTAA |
| 2221 | AAACTCTTTC ACCACATATT CTTGCCAATT AATTGGATCA TATAAGTAAA ATCATTACAA |
| 2281 | ATATAAGTAT TTACAGGATT TTAAAGTTAG AATATATTTG AATGCATGGG TAGAAAATAT |
| 2341 | CATATTTTAA AACTATGTAT ATTTAAATTT AGTAATTTTC TAATCTCTAG AAATCTCTGC |
| 2401 | TGTTCAAAAG GTGGCAGCAC TGAAAGTTGT TTTCCTGTTA GATGCCAAGA GCACAATGCC |
| 2461 | CAAAATAGAA GATGCAGTTA AGAATAAGGG GCCCTGAATG TCATGAAGGC TTGAGGTCAG |
| 2521 | CCTACAGATA ACAGGATTAT TACAAGGATG AATTTCCACT TCAAAAGTCT TTCATTGGCA |
| 2581 | GATCTTGGTA GCACTTTATA TGTTCACCAA TGGGAGGTCA ATATTTATCT AATTTAAAAG |
| 2641 | GTATGCTAAC CACTGTGCTT TTAATTTCAA AATATTTGTC ATTCAAGTCC CTTTACATAA |
| 2701 | ATAGTATTTC GTAATACATT TATAGATGAG ACTTATATGA AAAGGCTAGG TCAACAAAAA |
| 2761 | CAATAGATTC ATTTAATTTT CCTGTGGTTA ACCTATACGA CCAGGATGTA GAAAACTAGA |
| 2821 | AAGAACTGCC CTTCCTCACA TATACTCTTG CGAGAGAGCA TGAATGCTAT TCTGAACTAT |
| 2881 | CACCTGATTC AAGGACTTTG CTAGCTAGGT TTTGAGGTCA GGCTTCAGTA ACTGTAGTCT |
| 2941 | TGTGAGCATA TTGAGGGCAG AGGAGGACTT AGTTTTTCAT ATGTGTTTCC TTAGTGCCTA |
| 3001 | GCAGACTATC TGTTCATAAT CAGTTTTCAG TGTGAATTCA CTGAATGTTT ATAGACAAAA |
| 3061 | GAAAATACAC ACTAAAACTA ATCTTCATTT TAAAAGGGTA AAACATGACT ATACAGAAAT |
| 3121 | TTAAATAGAA ATAGTGTATA TACATATAAA ATACAAGCTA TGTTAGGACC AAATGCTCTT |
| 3181 | TGTCTATGGA GTTATACTTC CATCAAATTA CATAGCAATG CTGAATTAGG CAAAACCAAC |
| 3241 | ATTTAGTGGT AAATCCATTC CTGGTAGTAT AAGTCACCTA AAAAAGACTT CTAGAAATAT |
| 3301 | GTACTTTAAT TATTTGTTTT TCTCCTATTT TTAAATTTAT TATGCAAATT TTAGAAAATA |
| 3361 | AAATTTGCTC TAGTTACACA CCTTTAGAAT TCTAGAATAT TAAAACTGTA AGGGGCCTCC |
| 3421 | ATCCCTCTTA CTCATTTGTA GTCTAGGAAA TTGAGATTTT GATACACCTA AGGTCACGCA |
| 3481 | GCTGGCTAGA TATACACCTG TCACAAGAGT CTAGATCAGT TAGCACATGC TTTCTACTCT |
| 3541 | TCGATTATTA GTATTATTAG CTAATGGTCT TTGGCATGTT TTTGTTTTTT ATTTCTGTTG |
| 3601 | AGATATAGCC TTTACATTTG TACACAAATG TGACTATGTC TTGGCAATGC ACTTCATACA |
| 3661 | CAATGACTAA TGTATACTGT GATGATTTGA CTCAAAAGGA GAAAAGAAAT TATGTAGTTT |
| 3721 | TCAATTCTGA TTCCTATTCA CCTTTTGTTT ATGAATGGAA AGCTTTGTGC AAAATATACA |
| 3781 | TATAAGCAGA CTAAGCCTTT TAAAAATGTT CTTTGAAAGA TAAAATTAAA TACATGAGTT |
| 3841 | TCTAACAATT ACA |

GENBANK ID: AAA62202.1
DEFINITION HUMAN ENDOTHELIAL-MONOCYTE ACTIVATING POLYPEPTIDE II MRNA,
COMPLETE
CDS.
VERSION U10117.1 GI:498909
MRNA 1..1057
CDS 50..988
/CODON_START=1

| | |
|---|---|
| 1 | GGAACCCGTG GTCCTCCGCT TCATGATTTT CTGCCGTCTC TTGGCAAAAA TGGCAAATAA |
| 61 | TGATGCTGTT CTGAAGAGAC TGGAGCAGAA GGGTGCAGAC GCAGATCAAA TCATTGAATA |
| 121 | TCTTAAGCAG CAAGTTTCTC TACTTAAGGA GAAAGCAATT TTGCAGGCAA CTTTGAGGGA |
| 181 | AGAGAAGAAA CTTCGAGTTG AAAATGCTAA ACTGAAGAAA GAAATTGAAG AACTGAAACA |
| 241 | AGAGCTAATT CAGGCAGAAA TTCAAAATGG AGTGAAGCAA ATAGCATTPC CATCTGGTAC |
| 301 | TCCACTGCAC GCTAATTCTA TGGTTTCTGA AAATGTGATA CAGTCTACAG CAGTAACAAC |
| 361 | CGTATCTTCT GGTACCAAAG AACAGATAAA AGGAGGAACA GGAGACGAAA AGAAAGCGAA |
| 421 | AGAGAAAATT GAAAAGAAAG GAGAGAAGAA GGAGAAAAAA CAGCAATCAA TAGCTGGAAG |
| 481 | TGCCGACTCT AAGCCAATAG ATGTTTCCCG TCTGGATCTT CGAATTGGTT GCATCATAAC |
| 541 | TGCTAGAAAA CACCCTGATG CAGATTCTTT GTATGTCGAA GAAGTAGATG TCGGAGAAAT |
| 601 | AGCCCCAAGG ACAGTTGTCA GTGGCCTGGT GAATCATGTT CCTCTTGAAC AGATGCAAAA |
| 661 | TCGGATGGTG ATTTTACTTT GTAACCTGAA ACCTGCAAAG ATGAGGGGAG TATTATCTCA |
| 721 | AGCAATGGTC ATGTGTGCTA GTTCACCAGA GAAAATTGAA ATCTTGGCTC CTCCAAATGG |
| 781 | GTCTGTTCCT GGAGACAGAA TTACTTTTGA TGCTTTCCCA GGAGAGCCTG ACAAGGAGCT |
| 841 | GAATCCTAAG AAGAAGATTT GGGAGCAGAT CCAGCCTGAT CTTCACACTA ATGATGAGTG |
| 901 | TGTGGCTACA TACAAAGGAG TTCCCTTTGA GGTGAAAGGG AAGGGAGTAT GTAGGGCTCA |
| 961 | AACCATGAGC AACAGTGGAA TCAAATAAAA TGCTTCCACT ACCAAAAGAC ATTAGAGAAA |
| 1021 | ACCTTAAAAG TAATAAAGAG AAATATATTT GTCACTT |

GENBANK ID: P17936
DEFINITION HUMAN ACIDIC FIBROELAST GROWTH FACTOR MRNA, 5′END, CLONE
LA64BDA-MJ36.
CDS 358..>478
/CODON_START=1

| | |
|---|---|
| 1 | TCCCCAAGGC TAGGAGGCCA ACCTACTAAC AGGTGGGTGG GTATGGTGTG TGGTTTCACT |
| 61 | CAGTTCTTCT CATGGGGTTT CTCTGAGCTC CATTCATACC AGAAAGGGAG CAGGAGAGAG |
| 121 | AGGACAAGTG GATCCAACAG CCTTCGCTCC AGGGGAATCA GGGCATCGCC TCCTTTTCTG |
| 181 | GGAGGACACT CCCTTCTGAT GGTGAATGGG AACTCCCTTC CTCCTGCAGC AGCCTGCCTG |
| 241 | CAGCTGTCCT GGTAGAACAG TGTGGACATT GCAGAAGCTG TCACTGCCCC AGAAAGAAAG |
| 301 | CACCCCAGAG CCAAGGCAAA GAGTCTTGAA AGCGCCACAA GCAGCAGCTG CTGAGCCATG |
| 361 | GCTGAAGGGG AAATCACCAC CTTCACAGCC CTGACCGAGA AGTTTAATCT GCCTCCAGGG |
| 421 | AATTACAAGA AGCCCAAACT CCTCTACTGT AGCAACGGGG GCCACTTCCT GAGGATCC |

GENBANK ID:
U76376. 1
VERSION U76376.1 GI:1923234
MCPCPLHRGRGPPAVCACSAGRLGLRSSAAQLTAARLKALGDEL
HQRTMWRRRARSRRAPAPGALPTYWPWLCAAAQVAALAAWLLGRRNL
GENBANK ID: Y00638
VERSION Y00638.1 GI:34280
MYLWLKLLAFGFAFLDTEVFVTGQSPTPSPTGLTTAKNPSVPLS
SDPLPTHTTAFSPASTFERENDFSETTTSLSPDNTSTQVSPDSLDNASAFNTTGVSSV
QTPHLPTHADSQTPSAGTDTQTFSGSAANAKLNFTPGSNAISDVPGERSTASTFPTDP
VSPLTTTLSLAHHSSAALPARTSNTTITANTSDAYLNASETTTLSPSGSAVISTTTIA
TTPSKPTCDEKYANITVDYLYNKETKLFTAKLNVNENVECGNNTCTNNEVHNLTECKN
ASVSISHNSCTAPDKTLILDVPPGVEKFQLHDCTQVEKADTTICLKWKNIETFTCDTQ
NITYRFQCGNNIFDNKEIKLENLEPEHEYKCDSEILYNNHKFTNASKIIKTDFGSPGE
PQIIFCRSEAAHQGVITWNPPQRSFHNFTLCYIKETEKDCLNLDKNLIKYDLQNLKPY
TKYVLSLHAYIIAKVQRNGSAAMCHFTTKSAPPSQVWNMTVSMTSDNSMHVKCRPPRD
RNGPHERYHLEVEAGNTLVRNESHKNCDFRVKDLQYSTDYTFKAYFHNGDYFGEPFIL
HHSTSYNSKALIAFLAFLIIVTSIALLVVLYKIYDLHKKRSCNLDEQQELVERDDEKQ
LMNVEPIHADILLETYKRKIADEGRPFLAEFQSIPRVFSKFPIKEARKPFNQNKNRYV
DILPYDYNRVELSEINGDAGSNYINASYIDGFKEPRKYIAAQGPRDETVDDFWRMIWE
QKATVIVNVTRCEEGNRNKCAEYWPSMEEGTRAFGDVVVKINQHKRCPDYIIQKLNIV
NKKEKATGREVTHIQFTSWPDHGVPEDPHLLLKLRRRVNAFSNFFSGPIVVHCSAGVG
RTGTYIGIDAMLEGLEAENKVDVYGYVVKLRRQRCLMVQVEAQYILIHQALVEYNQFG
ETEVNLSELHPYLHNNKKRDPPSEPSPLEAEFQRLPSYRSWRTQHIGNQEENKSKNRN
SNVIPYDYNRVPLKHELEMSKESEHDSDESSDDDSDSEEPSKYINASFIMSYWKPEVM
IAAQGPLKETIGDFWQMIFGRKVKVIVNLTELKHGDDEICAQYWGEGKQTYGDIEVDL
KDTDKSSTYTLRVFELRHSKRKDSRTVYQYQYTNWSVEDLPAEPKELISNIQVVKQKL
PQKNSSEGNKHHKSTPLLTHCRDGSQQTCIFCALLNLLESAETEEVVDIFQVVRALRK
ARLGMVSTFEQYQFLYDVIASTYPAQNQQVKKNNHQEDKIEFDNEVDKVKQDANCVNP
LGAPEKLPEAKEQAEGSEPTSGTEGPENSVNGPASPALNQGS
GENBANK ID: AF001383.1
VERSION AF001383.1 GI:2199534
MAEMGSKGVTAGKIASNVQKKLTRAQEKVLQKLDKADETKDEQF
EQCVQNFNKQLTECTRLQKDLRTYLASVKANHEASKKLNECLQEVYEPDWFGRDEANK
IAENNDLLNMDYHQKLVDQALLTMDTYLGQFPDIKSRIAKRQRKLVDYDSARHHYESL
QTAKKKDEAKIAKAEEELIKAQKVFEENNVDLQEELPSLWNSRVGFYVNTEQSIAGLE
ENFHKEMSKLNQNLNDVLVGLEKQNGSNTFTVKAQPSDNAPAKGNKSPSPEDGSPAAT
PEIRVNHEPEPAGGATPGATLFKSPSQLRKGPPVPPPFKHTPSKEVKQEQILSLFEDT
FVPEISVTTPSQPAEASEVAGGTQPAAGAQEPCETAASEAASSSLPAVVVETFPATVN
GTVEGGSGAGRLDLPPGFMFKVQAQEDYTATDTDELQLKAGDVVLVIPFQNFEEQDEG
WLMGVKESDWNQHKELEKCRGVFFENFTERVP
GENBANK ID: XM_038595.3
VERSION XM_038595.3 GI:18590923
MAPPSEETPLIPQRSCSLLSTEAGALHVLLPARGPGPPQRLSES
FGDHLAEDLCVQAAKASGILPVYRSLFALATEDLSCWFPPSHIESVEDASTQVLLYRI
REYEPNWEGLEKCNREGLRKDLASAILDLPVLEHLFAQERSDLVSGRLPVGLSLKEQG
ECLSLAVLDLARMAREQAQRPGELLKTVSYKACLPPSLRDLIQGLSPVTRRRIRRTVR
RALRRVAACQADRHSLMAKYIMDLERLDPAGAAETEHVGLPGALGGHDGLGLLRVAGD
GGIAWTQGEQEVLQPECDEFEIVDISIKQAPRVGPAGEHRLVTVTRTDNQILEAEFPG
LPEALSFVALVDGYFRLTTDSQHEFCKEVAPPRLLEEVAEQCHGPITLDFAINKLKTG
GSRPGSYVLRRSPQDEDSELLTVCVQNPLGPDYKGCLIRRSPTGTELLVGLSRPHSSL
RELLATCNDGGLHVDGVAVTLTSCCIPRPKEKSNLIVVQRGHSPPTSSLVQPQSQVQL
SQMTFEKIFADSLEWHENLGHGSETKIYRGCRHEVVDDEARKTEVLLKVMDAKHKNCM
ESFLEAASLMSQVSYRHLVLLHGVCNAGDSTNVQEFVHLGAIDNYLRKRCHLVPASWK
LQVVKQLAYALNYLEDKGLPNCNVSARKVLLAREGADGSPEFIELSDPCVSPAVLSLE
MLTDRIPWVAPECLREAQTLSLEADKNGFGATVWEVFSGVTNPISALDPAKKLQFYED
RQQLPAPKNTELALLIQQCNAYEPVQRPSERAVIRDLNSLISSDVELLSDPTPGALAP
RDGLWNGAQLYACQDPTIFEERHLKYISQLGKGNEQSVELCRVDFLGDNTGALVAVKQ
LQHSGPDQQRDEQREIQILKALHSDFIVKYRGVSYGPGRQSLRLVNEYLPSGCLRDEL
QRHRARLDASRLLLYSSQICKGNEYLGSRRCVHRDLAARNILVESEAHVKIADFGLAK
LLPLDKDYYVVREPGQSPIFWYAFESLSDNIESRQSDVWSFGVVLVELFTYCDKSCSP
SAEFLRMNGCERDVPALCRLLELLEEGQRLPAPPACPAEVEELMKLCWAPSPQDRPSF
SALDPQLDNLNSCSRGCETSAFTANPEGKHESLSFS
GENEANK ID: M32292.1
VERSION M32292.1 GI:181492
MENSLRCVWVPKLAEVLECASLLSAHLQVTCFQIKAETALRELS
EPSDAVTMRCGNVLLDCSAESDRGVFVIKWKKDGIHLALCMDERKQQLSNCSLLIQNI
LHSREHKPDEGLYQCEASLGDSGSIISRTAKVAVAGPLRELSQTESVTAENGDTVLLK
CEVIGEPMPTINNQKNQQDLTPIPGDSRVVVLPSGALQISRLQPGDIGIVRCSARNPA
SSRTGNEAEVRICSDPGLHRQLYFLQRPSNVVAIEGKDAVLECCVSGVPPPSFTWLRG
EEVIQLRSKKYSLLGGSNLLISNVTDDDSGMVTCVVTYKNENISASAELTVLVPPWFL
NHPSNLYAYESNDIEFECTVSCKPVPTVNWMKNCDVVIPSDYFQIVCCSNLRILGVVK
SDEGEYQCVAENEAGNAGTSAQLIVPKPAIPSSSVLPSAPRDVVPVLVSSREVRLSWR
PPAEAKCNIQTETVFFSREGDNRERALNTTQPGSLQLTVCNLKPEANVTFRVVAYNEW
GPGESSQPIKVATQPELQVPGPVENLQAVSTSPTSILITWEPPAVANGPVQCVRLFCT
EVSTGKEQNIEVDGLSYKLEGLKKFTEYSLRELAYNRYGPGVSTDDITVVTLSDVPSA
PPQNVSLEVVNSRSIKVSWLPPPSGTQNGEITGYKIRHRKTTRRGENETLEPNNLWYL
FTGLEKGSQYSFQVSANTVNCTCPPSNWYTAETPENDLDESQVPDQFSSLHVRPQTNC
IIMSWTPPLN
GENBANK ID: X06318
VERSION X06318.1 GI:35488
MADPAACFFPSEGEESTVRFARKGALRQKNVHEVKNHKETAREF
KQPTFCSHCTDFIWCFGKQGEQCQVCCFVVHKRCNEFVTFSCPGADKGPASDDPRSKH
KEKIHTYSSPTECDHCGSLLYGLIHQGMKCDTCMNNVHKRCVNNVPSLCCTDHTERRG
RIYIQAHIDRDVLIVLVRDAKNLVPNDPNGLSDPYVKLELIPDPKSESKQETETIKCS
LNPEWNETFRFQLKESDKDRRLSVETWDWDLTSRNDFMGSLSFGISELQKASVDGWFK
LLSQEEGEYFNVPVPPEGSEANEELRQKFERAKISQGTKVFEEKTTNTVSKFDNNGNR
DRMKLTDFNFLMVLGKGSFGKVMLSERKGTDELYAVKTLKKDVVTQDDDVECTMVEKR
VLALPGKPPFLTQLHSCFQTMDRLYFVMEYVNGGDLNYNIQQVGRFKEPHAVFYAAEI
AIGLFFLQSKGIIYRDLKLDNVNLDSEGHIRIADFCNCKENINDGVTTKTFCGTPDYI
APEIIAYQFYGKSVDWWAFGVLLYEMLAGQAFFEGEDEDELFQSIMEHNVAYFKSMSK
EAVAICKGLMTKHFGKRLGCGPEGERDIKEHAFFRYIDWEKLERKEIQFPYKPKARDK
RDTSNFDKEFTRQPVELTFTDKLFIMNLDQNEFAGFSYTNPEFVINV
GENBANK ID: J04122.1
VERSION J04132.1 GI:623041
MKWKALFTAAILQAQLFITEAQSFGLLDPELCYLLDGILFIYGV
ILTALFLRVKFSRSAEPPAYQQGQNQLYNELNLGRREEYDVLDKRRGRDPEMGGKPRR
KNPQEGLYNELQKDKMAEAYSEIGNKGERRRGKGHDGLYQGLSTATKDTYDALHNQAL
PPR
GENBANK ID: 004313.1
VERSION 004313.1 GI:453368
MDALQLANSAFAVDLFKQLCEKEPLGNVLFSPICLSTSLSLAQV
GAKGDTANEIGQVLHFENVKDIPFGFQTVTSDVNKLSSFYSLKLIKRLYVDKSLNLST
EFISSTKRPYAKELETVDFKDKLEETKGQINNSIKDLTDGHFENILADNSVNDQTKIL
VVNAAYFVGKWNKKFPESETKECPFRLNKTDTKPVGMNNMEATFCMGNIDSINCKIIE
LPFQNKHLSMFILLPKDVEDESTGLEKIEKQLNSESLSQWTNPSTMANAKVKLSIPKF
KVEKMIDPKACLENLGLKHIFSEDTSDFSGNSETKGVALSNVINKVCLEITEDGGDSI
EVPGARILQHKDELNADHFFIYIIRHNKTRNIIFFGKFCSP
GENBANK ID: X68968.1
VERSION X68968.1 GI:452315
MDEPSPLAQFLELNQHSRFIIGSVSEDNSEGEISNLVKLDLLEE
KEGSLSPASVGSDTLSDLGISSLQDGLALHIRSSNSGLELVKQGRDRKKIDSQRDFTV
ASPAEFVTRFGGNKVIEKVLIANNGIAAVECMRSIRRWSYENFRNERAIRFVVMVTPE
DLKANAEYIKMADHYVPVFGGFNNNNYANVELILDIAKRIFVQAVWAGWGHASENPKL
PELLLKNGIAFNGPPSQANNALGDKIASSIVAQTAGIFTLFWSGSGLRVDWQENDFSK
RILNVFQELYEKGYVKDVDDGLQAAEEVGYPVNIKASEGGGGEGIRKVNNAGDFPNLF
RQVQAEVPGSPIFVMRLAKQSRHLEVQILADQYGNAISLFGRDCSVQRRHQKIIEEAP
ATIATFAVFEHMEQCAVKLAKMVGYVSAGTVEYLYSQDRSFYFLELNPRLQVEHFCTE
MVADVNLFAAQLQIAMGIFLYRIKDIRMMYGVSFWGDSFIDFEDSAHVFCPRGHVIAA
RITSENFDEGFKPSSGTVQELNFRSNKNVWGYFSVAAAGGLHEFADSQFGHCFSWGES
REEAISNNVVALKELSIRGDFRTTVEYLIKLLETESFQMNRIDTGWLDRLIAEKVQAE
RPDTMLGVVCGALHVADVSLRNSVSNFLHSLERGQVLEAHTLLNTVDVELIYEGVKYV
LKVTRQSPNSYVVINNGSCVEVDVHRLSDGGLLLSYDGSSYTTYNKEEVDRYRITIGN
KTCVFEKENDPSVMRSFSAGKLIQYIVEDGGHVLAGQCYAEIEVMKMVMTLTAVESGC
IHYVKRPGAALDPGCVLAKMQLDNPSKVQQAELHTGSLPRIQSTALRGEKLHRVFHYV
LDNLVNVMNGYCLFDFFSSSKVKDWVERLNKTLRDPSLPLLELQDIMTSVSGRIPPNV
EKSIKKEMAQYASNITSVLCQFPSQQIANILDSHAATLNRKSEREVFFNNTQSIVQLV
QRYRSGIRGHMKAVVMDLLRGYLRVETQFQNGHYDKCVFALREENKSDMNTVLNYIFS
HAQVTKKNLLVTMLIDQLCGRDPTLTDELLNILTELTQLSKTTNAKVALRARQVLIAS
HLPSYELRHNQVESIFLSAIDMYGHQFCIENLQKLILSEISIFDVLPNFFYNSNQVVR
MAALEVYVRRAYIAYELNSVQHRQLKDNTCVVEFQFNLPTSNPNRGNIPTLNRMSFSS
NLNHYGMTHVASVSDVLLDNSFTPPCQRMCGMVSFRTFEDFVRIFDEVNGCFSDSPPQ
SPTFPEAGHTSLYDEDKVPRDEPIHILNVAIKTDCDIEDDRLAANFREFTQQNKATLV
DHGIRELTFLVAQKDFRKQVNYEVDRRFHREFPKFFTFRARDKFEEDRIYRELEPALA
FQLELNRMRNFDLTAIPCANEKMHLYLGAAKVEVGTEVTDYRFFVRAIIRHSDLVTKE
ASFEYLQNEGERLLLEANDELEVAFNNTNVRTDCNHIFLNFVPTVIMDFSKIEESVRY
MVMRYGSRLWKLRVLQAEVKINIRQTTTGSAVPIRLFITNESGYYLDISLYKEVTDSR
SGNIMFHSFGNKQGFQHGNLINTPYVTEDLLQAKREGAQTLGTTYIYDFFEMFRQALF
KLWGSPDKYPKDILTYTELVLDSQGQLVENNRLFGGNEVGNVAFKMRFKTQEYFEGRD
VIVIGNDITFRIGSFGPGEDLLYLRASEMARAEAIFKIYVAANSGARIGMAEEIKHMF
HVAWVDPEDFHKGFKYLYLTPQDYTRISSLNSVHCKHIEEGGESRYMITDIIGKDDGL
GVENLRGSGMIAGESSLAYEEIVTISLVTCRAIGIGAYLVRLGQRVIQVENSHIILTG
ASALNKVLGREVYTSNNQLGGVQINNYNGVSEITVPDDFEGVYTILEWLSYMPKDNHS
PVPIITPTDPIDREIEFLFSRAPYDPRWNLAGRFHFTLKGTWQSGFFDHGSFKEIMAP
WAQTVVTGRARLGGIPVGVIAVETRTVEVAVPADPANLDSEAKIIQQAGQVWFPDSAY
KTAQAIKDFNREKLFLMIEANWRGFSGGNKDNYDQVLRFGAYTVDGLRQYKQPTLIYI
RPMRELRGGSWVVIDATINFLCIENYADKESRGGVLEFEGTVEIKFRKEDLIKSMRRI
DPAYKKLNEQLGEPDLSDKDRKDLEGRLKAREDLLLPIYHQVAVQFADFHDTPGEMLE
KGVISDILEWKTARTFLYWRLRRLLLEDQVKQEILQASGELSEVHIQSMLRRWFVETE
GAVRAYLWDNNQVVVQWLEQHWQAGDGPRSTIRENITYLKHDSVLKTIRGLVEENPEV
AVDCVIYLSQHISFAERAQVVHLLSTMDSPAST
GENBANK ID: L03840.1
VERSION L03840.1 GI:182570
MRLLLALLGVLLSVPGPPVLSLEASEEVELEPCLAPSLEQQEQE
LTVALGQPVRLCCGRAERGGHWYKEGSRLAPAGRVRGWRGRLEIASELFEDAGRYLCL
ARGSMIVLQNLTLITGDSLTSSNDDEGPKSNRDPSNRNSYPQQAPYNTHPQRMEKKLH
AVPAGNTVKFRCFAAGNPTPTIRWLKGGQAFHGENRIGGIRLRHQEWSLVMESVVPSD
RGTYTCLVENAVGSIRYNYLLDVLERSPHRPILQAGLPANTTAVVGSDVELLCKVYSD
AQPHIQWLKHIVINGSSFGADGFPYVQVLKTADINSSEVEVLYLRNVSAEDAGEYTCL
AGNSIGLSYQSAWLTVLPEEDPTWTAAAPEARYTDIILYASGSLALAVLLLLAGLYRG
QALNGRHPRPPATVQKLSRFPLARQFSLESGSSGKSSSSLVRGVRLSSSGPALLAGLV
SLDLPLDPLWEFPRDRLVLGKPLGEGCFGQVVRAEAFGMDPARPDQASTVAVKMLKDN
ASDKDLADLVSEMEVMKLIGRHENIINLLGVCTQEGPLYVIVECAAKGNLREFLRARR
PPGPDLSPDGPRSSEGPLSFPVLVSCAYQVARGNQYLESRKCIHRDLAARNVLVTEDN
VMKIADFGLARGVHNIDYYKKTSNGRLPVKWMAPEALFDRVYTHQSDVWSFGILLWEI
FTLGGSPYPGIPVEELFSLLREGHRMDRFFHCPFELYGLMRECWHAAPSQRPTFKQLV
EALDKVLLAVSEEYLDLRLTFGPYSPSGGDASSTCSSSDSVFSHDPLPLGSSSFPFGS
GVQT
GENBANK ID: AF043342.1
VERSION AF043342.1 GI:2905633
VRSSSRTPSDKPVANVVANPQAEGQLQWLNRRANALLANGVELR
DNQLVVPSEGLYLIYSQVLFKGQGCPSTHVLLTHITSRIAVSYQTKVNLLSAIKSPCQ
RETPRGAEAKPWYEPIYLCGVFQLEKGDRLSAEINRPDYLDFAESGQVYFGITAL
GENBANK ID: NM_000735.2
VERSION NM_000735.2 GI:10800407
MDYYRKYAAIFLVTLSVFLNVLNSAPDVQDCPECTLQENPFFSQ
PGAPILQCMGCCFSRAYPTPLRSKKTNLVQKNVTSESTCCVAKSYNRVTVN0GFKVEN
HTACNCSTCYYNKS
GENBANK ID: M83533.1
VERSION M83533.1 GI:178541
LRKHNIETYLIKQPEDSLLSLPEDIVKESVSSSDRRNSGATFTE
GSWSPELPFDNIVGKQNTLAALTRNSINLLPNHLAQALHVQSGPEEINKRIEHTIDLR
SGDKLRRENIKPFSLNFKDSSLENKYSQMRDEVFKSNLVCAFIVLLFITAIQSLLPSS
RVMPMTIQFSILIMLHSALVLITTAEDYKCLPLILRKTCCWINETYLARNVIIFASIL
INFLGAILNILWCDFDKSIPLKNLTFNSSAVFTDICSYPEYFVFTGVLANVTCAVFLR
LNSVLKLAVLLIMIAIYALLTETVYA0LFLRYDNLNESGEDFLGTKEVSLLLMANFLL
AVFYHGQQLEYTARLDFLWRVQAKEEINEMKELREHNENMLRNILPSHVARNELEKDR
DNEELYSQSYDAVGVMFASIPGFADFYSQTEMNNQGVECLRLLNEIIADFDELLGEDR
FQDIEKIKTIGSTYNAVSGLSPEKQQCEDKWGHLCALADFSLALTESIQEINKHSFNN
FELRIGISNGSVVAGVIGAKKPQYDIMGKTVNLASRMDSTGVSGRIQVPEETYLILKD
QGFAFDYRGEIYVEGISEQEGKIKTYFLLGRVQPNPFILPPRRLPGQYSLAAVVLGLV
QSLNRQRQKQLLNENNNTGIIKGNYNRRTLLSPSGTEPGAQAEGTDKSDLP
GENBANK ID: M31767.1
VERSION M31767.1 GI:181615
MDKDCEMKRTTLDSPLGKLELSGCEQGLNEIKLLGKGTSAADAV
EVPAPAAVLGGPEPLMQCTAWLNAYFHQPEAIEEFPVPALHHPVFQQESFTRQVLWKL
LKVVKFGEVISYQQLAALAGNPKATRAVGGAMRGNPVPILIPCHRVVCSSGAVGNYSG
GLAVKENLLANEGNRLGKPGLGGSSGLAGAWLKGAGATSGSPPAGRN
GENBANK ID: X14723
VERSION X14723.1 GI:30250
MMKTLLLFVGLLLTWESGQVLGDQTVSDNELQEMSNQGSKYVNK
EIQNAVNGVKQTKTLIEKTNEERKTLLSNLEEAKKKKEDALNETRESETKLKELPGVC
NETMMALWEECKPCLKQTCMKFYARVCRSGSGLVGRQLEEFLNQSSFFYFWNNGDRID
SLLENDRQQTHMLDVMQDHFSRASSIIDELFQDRFFTREPQDTYHYLPFSLPHRRPHF
FFPKSRIVRSLNPFSPYEPLNFHAMFQPFLEMTHEAQQAMDIHFESPAFQNPPTEFIR
EGDDDRTVCREIRHNSTGCLRMKDQCDKCREILSVDCSTNNPSQAKLRRELDESLQVA
ERLTRKYNELLKSYQWKMLNTSSLLEQLNEQFNWVSRLANLTQGEDQYYLRVTTVASH
TSDSDVPSGVTEVVVKLFDSDPITVTVEVEVSRKNFKFMETVAEKALQEYRKKHREE
GENBANK ID: X04391.1
VERSION X04391.1 GI:37186
MPMGSLQPLATLYLLGNLVASCLGRLSWYDPDFQARLTRSNSKC
QGQLEVYLKDGWHMVCSQSWGRSSKQWEDESQASKVCQRLNCGVPLSLGPFLVTYTPQ
SSIICYGQLGSFSNCSESRNDMCESLGLTCLEPQKTTFFTTRPPPTTTPEPTAPPRLQ
LVAQSGGQHCAGVVEFYSGSLGGTISYEAQDKTQDLENFLCNNLQCGSFLKHLPETEA
GRAQDPGEFRENQPLPIQWKIQNSSCTSLEHCFRKIKPQKSGRVLALLCSGFQPKVQS
RLVGGSSICEGTVEVRQGAQWAALCDSSSARSSLRWEEVCREQQCGSVNSYRVLDAGD
PTSRGLFCFHQKLSQCEELWERNSYCKKVFVTCQDPNPAGLAAGTVASIILALVLLVV
LLVVCGPLAYKKLVKKFRGKKQRQWIGPTGNNQNNSFHRNETATVRSHAENPTASHVD
NEYSQFPRNSRLSAYFALEGVLNRSSNQPDNSSDSDYDLHGAQRL
GENBANK ID: S78187.1
VERSION S78187.1 GI:243485
MEVPQPEPAPGSALSPAGVCGGAQRPGHLPGLLLGSHGLLGSPV
RAAASSFVTTLTQTMHDLAGLGSRSRLTELSLSRRASESSLSSESSESSDAGLCMDSP
SPMDPHMAEQTFEQAIQAASRIIRNEQFAIRRFQSNPVRLLGHSPVLRNITNSQAPDG
RRKSEAGSGAASSSGEDKENDGFVFKMPWKPTHPSSTHALAEWASRREAFAQRPSSAP
DLMCLSPDRKNEVEELSPLALGRFSLTFAEGDTEEDDGFVDILESDLKDDDAVPPGME
SLISAPLVKTLEKEEEKDLVMYSKCQRLFRSFSNPCSVIRPILKRLERPQGRDTPVQN
KRRRSVTPPEEQQEAEEEKARVLRSKSLCHDEIENDLLSDHRELIGDYSKAFLLQTVD
GKHQDLKYISPETNVALLTGKFSNIVDKFVIVDCRYPYEYEGGHIKTAVNLPLERDAE
SFLLKSPIAPCSLDKRVILIFNCEFSSERGPRMCRFIRERDRAVNDYFSLYYPEMYIL
KGGYKEFFPQHPNFCEPQDYRPNNHEAFKDELKTFRLKTRSWAGERSRRELCDRLQDQ
GENBANK ID: Y00096.1
VERSION Y00096.1 GI:30455
MREAAFMYSTAVAIFLVILVAALQGSAPRESPLPYEIPLDPEGS
LELSWNVSYTQEAIHFQLLVRRLKAGVLFGMSDRQELENADLVVLWTDGDTAYFADAW
SDQKGQIHLDFQQDYQLLQVQRTPEGLTLLFKRPFGTCDPKDYLIEDGTVHLVYGILE
EPFRSLEAINGSGLQMGLQRVQLLKFNIFEPELFSDTCTNEVQAFNIQIESQETTYWC
YIKELPKGFSRHHIIKYEPIVTKGNEALVHHMEVFQCAPEMDSVPHFSGPCDSKMKPD
RLNYCRHVLAAWALGAKAFYYPEEAGLAFGGPGSSRVLRLEVHYHNPLVIEGRNDSSG
IRLYYTAKLRRFNAGINELGLVYIPVMAIFPRETAFILTGYCTDKCTQLALPPSGIHI
FASQLHTHLTGRKVVTVLVRDGREWEIVNQDNHYSFHFQEIRMLKKVVSVHFGDVLIT
SCTYNTEDRELATVGGFGILEEMCVNYVHYYPQTQLELCKTAVDAGFLQKYFHLINRF
NNEDVCTCFQASVSQQFTSVFWNSFNCDVLKALYSFAPISMHCNKSSAVRFQGEWNLQ
PLPKVISTLEEPTPQCPTSQGRSPAGPTVVSIGGGKG
GENBANK ID: XM_055551.3
VERSION XM_055551.3 GI:18557356
MKETQKSTYYITGESKEQVANSAFVERVRKQGFEVVYNTEPIDE
YCVQQLKEFDGKSLVSVTKEGLELPEDEEEKKKMEESKEKFENLCKLMKEILDKKVEK
VTISNRLVSSPCCIVTSTYGWTANMEQIMKAQALRDNSTMGYMNAKKHLEINPDHPIM
ETLRQKAEADKNDKAVKDLVVLLFETALLSSGFSLEDPQTHSNHIYHMIKLGLGTDED
EVAAEEPSDAVPDEIFFLEQDEDASRMEEVD
GENBANK ID: M84711.1
VERSION M84711.1 GI:182774
MAVGKNKRLTKGGKKGAKKKVVDPFSKKDWYDVKAPAMFNIRNI
GKTLVTRTQGTKIASDGLKCRVFEVSLADLQNDEVAFRKFKLITEDVQGKNCLTNFHG
MDLTRDKMCSMVKKWQTNIEAHVDVKTTDGYLLRLFCVGFTKKRNNQIRKTSYAQEQQ
VRQIRKKMMEIMTREVQTNDLKEVVNKLTPDSIGKDIEKACQSIYPLHDVFVRKVKML
KKPKFELGKLMELRGEGSSSGKATGDETGAKVERADGYEPPVQESV
GENBANK ID: X53505
VERSION X53505.1 GI:36145
MAEEGIAAGGVMDVNTALQEVLKTALIHDGLARGIREAAKALDK
RQAHLCVQASNCDEPMYVKLVEALLAEHQINLIKVDDNKKLGEWVGLCKIDREGNPRK
VVGCSCVVVKDYGKESQAKDVIEEYFKCKK
GENBANK ID: X06617
VERSION X06617.1 GI:26143
MADIQTERAYQKQPTIFQNKKRVLLGETGKEKLFRYYKNIGLGF
KTPKEAIEGTYIDKKCPFTGNVSIRGRILSGVVTKMKMQRTIVIRRDYLHYIRKYNRF
EKRHKNMSVHLSPCFRDVQIGDIVTVGECRFLSKTVRFNVLKVTKAAGTKKQFQKF
GENBANK: M55040.1
VERSION M55040.1 GI:177974
MRPPQCLLHTPSLASPLLLLLLWLLGGGVGAEGREDAELLVTVR
GGRLRGIRLKTPGGPVSAFLGIPFAEPPNGPRRFLPPEPKQPWSGVVDATTFQSVCYQ
YVDTLYPGFEGTEMNNPNRELSEDCLYLNVWTPYPRPTSPTBVLVWIYGGGFYSGASS
LDVYDGRFLVQAERTVLVSNNYRVGAFGFLALPGSREAPGNVGLLDGRLALQWVQENV
AAFGGDPTSVTLFGESAGAASVGMHLLSPPSRGLFHRAVLQSGAPNGPWATVGNGEAR
RRATQLAHLVGCPBGGTGGNDTELVACLRTRPAQVLVNKEWHVLPQESVFRFSFVPVV
DGDFLSDTPEALINAGDFHGLQVLVGVVKDEGSYFLVYGAPGFSKDNESLISRAEFLA
GVRVGVPQVSDLAAEAVVLHYTDWLHPEDFARLREALSDVVGDHNVVCPVAQLAGRLA
AQGARVYAYVFEHRASTLSWPLWMGVPHGYEIEFIFGIFLDPSRNYTAEEKIFAQRLM
RYWANFARTGDPNEPRDPKAPQWPPYTAGAQQYVSLDLRPLEVRRGLRAQACAFWNRF
LPKLLSATDTLDEAERQWKAEFHRWSSYMVHWKNQFDHYSKQDRCSDL
GENBANK ID: NM_000717.2
VERSION NM_000717.2 GI:9951925
MRMLLALLALSAARPSASAESHWCYEVQAESSNYPCLVPVKNGG
NCQKDRQSPINIVTTKAKVDKKLGRFFFSGYDKKQTWTVQNNGHSVMMLLENKASISG
GGLDAPYQAKQLHLHWSDLPYKGSEHSLDGEHFANEMNIVHEKEKGTSRNVKEAQDPE
DEIAVLAFLVEAGTQVNEGFQPLVEALSNIPKPEMSTTMAESSLLDLLFKEEKLRHYF
RYLGSLTTPTCDEKVVWTVFREPIQLRREQILAFSQKLYYDKEQTVSMKDNVRPLQQL
GQRTVIKSGAPGRPLPWALPALLGPMLACLLAGFLR
GENBANK ID: S70S87.1
VERSION S70587.1 GI:546848
MTALFLMSNLFGLACGQAMSFCIPTEYTMHIERRECAYCLTINT
TMCAGYCNTRDINGKLFLPKYALSQDVCTYRDFIYRTVEIPGCPLHVAPYFSYPVALS
CKCGKCNTDYSDCIHEAIKTNYCTKPQKSYLVGFSV
GENBANK ID: M34057
VERSION M34057.1 GI:339547
MDTKLMCLLFFFSLFPLLVSNHTGRIKVVFTPSICKVTCTKGSC
QNSCEKGNTTTLISENGHAADTLTATNFRVVICHLPCNNGGQCSSRDKCQCFFNFTGK
LCQIPVHGASVPKLYQNSQGFGKALGTHVIHSTHTLPLTVTSGQGVKVKFPPNIVNIH
VKHPPEASVQIHQVSRIDGPTGQKTKEAQPGQSQVSYQGLPVQKTQTIHSTYSHQQVI
PHVYPVAAKTQLGRCFQETIGSQCGKALPGLSKQEDCCGTVGTSWGFNKCQKCPKKPS
YHGYNQMMECLPGYKRVNNTFCQDINECQLQGVCFNGECLNTMGSYRCTCKIGFGPDP
TFSSCVPDPPVISEEKGPCYRLVSSGRQCMYPLSVHLTKQLCCCSVGKAGPHCEKCPL
PGTAAFKEICPGGMGYTVSGVHRRRPIHHHVGKGPVFVKPKNTQPVAKSTHPPPLPAK
EEPVEALTFSREHGARSAEPEVATAPPEKEIFSLDQEKTKLEPGQPQLSPGISAIHLH
PQFPVVIEKTSPFVPVEVAPEASTSSASQVIAPTQVTEINECTVNPDICGAGHCINLP
VRYTCICYEGYRFSEQQRKCVDIDECTQVQNLCSQGRCENTEGSFLCICPAGFMASEE
GTNCIDVDECLRPDVCGEGHCVNTVGAFRCEYCDSCYRMTQRGRCEDIDECLNPSTCP
DEQCVNSPGSYQCVPCTEGFRGWNGQCLDVDECLEFNVCANGDCSNLEGSYMCSCHKG
YTRTPDHKHCRDIDECQQCNLCVNGQCKNTECSFRCTCGQGYQLSAAKDQCEDIDECQ
NRHLCAHGQCRNTEGSFQCVCDQGYRASGLCDHCEDINECLEDKSVCQRGDCINTAGS
YDCTCPDGFQLDDNKTCQDINECEHPGLCGPQGECLNTEGSEHCVCQQGFSISADGRT
CEDIDECVNNTVCDSHGFCDNTAGSFRCLCYQGFQAPQDGQGCVDVNECELLSGVCGE
AFCENVEGSFLCVCADENQEYSPMTGQCRSRTSTDLDVDVDQPKEEKKECYYNLNDAS
LCDNVLAPNVTKQECCCTSGAGWGDNCEIFPCPVLCTAEFTEMCPKGKGFVPAGESSS
EAGGENYKDADECLLFGQEICKNGFCLNTRPGYECYCKQGTYYDFVKLQCFDNDECQD
PSSCIDGQCVNTEGSYNCFCTHPMVLDASEKRCIRFAESNEQIEETDVYQDLCWEHLS
DEYVCSRPLVGKQTTYTECCCLYGEAWGNQCALCPLKDSDDYAQLCNIPVTGRRQPYG
RDALVDFSEQYTFEADPYFIQDRFLNSFEELQAEECGILNGCENGRCVRVQEGYTCDC
LDGYHLDTAKNTCFDVNECDELNNRNSLCKNAKCINTDGSYKCLCLPGYVPSDKPNYC
TPLNTALNLEKDSDLE
GENBANK ID: AF257099.1
VERSION AF257099.1 GI:8037944
MSDAAVDTSSEITTEDLKEKKEVVEEAENGRDAFANGNANEENG
EPEADNEVDEEEEEGGEEEGDGEEEDGDEDEGAESATGKRAAEDDEDDDVDTQKQKTD
EDD
GENBANK ID: L06505.1
VERSION L06505.1 GI:186799
MPFKFDFNEIKVVYLRCTGGEVGATSALAPKIGPLGLSPKKVGD
DIAKATGDWKGLRITVKLTIQNRQAQIEVVPSASALIIKALKEPPRDRKKQKNIKHSG
NITFDEIVNIARQMRHRSLARELSGTIKEILGTAQSVGCNVDGRRHPHDIIDDINSGAV
ECPAS
GENBANK ID: X79234.1
VERSION X79234.1 GI:495125
MAQDQGEKENPMRELRIRKLCLNICVGESGGRLTRAAKVLEQLT
GQTPVFSKARYTVRSFGIRRNEKIAVECAVRGAKAEEILEKGLKVRELELRKNNFSDT
GNFGFGIQEHIDLGIEYDFSIGIYGLDFYVVLGRFGFSIADKKRRTGCIGAKHRISKE
EAMRWFQQKYDGIILPGK
GENBANK ID: X59932.1
VERSION X59932.1 GI:30255
MASIQAAWPSGTECIAKYNFHGTAEQDLPECKGDVLTIVAVIKD
PNWYKAKNKVGREGIIFANYVGKREGVKAGTKLSLNPWFHGKITREQAERLLYPPETG
LFLVRESTNYFGDYTLCVSCDGKVEHYRINYHASKLSIDEEVYFENLNQLVEHYTSDA
DGLCTRLIKFKVNEGTVAAQDEFYRSGWALNMKELKLLQTIGKGEFGDVNLGDYRGNK
VAVKCIKNDATAQAFLAEASVNTQLRHSNLVQLLGVIVEEKGGLYIVTEYMAKGSLVD
YLRSRGRSVLGGDCLLKFSLDVCEANEYLEGNNFVHRDLAARNVLVSEDNVAKVSDFG
LTKEASSTQDTGKLPVKWTAPEALREKKESTKSDVWSFGILLWEIYSFGRVPYPRIPL
KDVVFRVEKGYKNDAFDGCPFAVYEVNKNCWHLDAANRFSFLQLREQLEHIKTHELHL
GENBANK ID: AAA98616.1
VERSION AAA98616.1 GI:178428

| | |
|---|---|
| 1 | MQGPWVLLLL GLRLQLSLGI IPVEEENPDF WNRQAAEALG AAKKLQPAQT AAKNLIMFLG |
| 61 | DGMGVSTVTA ARILKGQKKD KLGPETFLAM DRFPYVALSK TYSVDKHVPD SGATATAYLC |
| 121 | GVKGNFQTIG LSAAARFNQC NTTRGNEVIS VVNRAKKAGK SVGVVTTTRV QHASPAGTYA |
| 181 | HTVNRNWYSD ADVPASARQE GCQDIATQLI SNMDIDVILG GGRKYMFPMG TPDPEYFDDY |
| 241 | SQGGTRLDGK NLVQEWLAKH QGARYVWNRT ELLQASLDPS VTHLMGLFEP GDMKYEIHRD |
| 301 | STLDPSLMEM TEAALLLLSR NPRGFFLFVE GGRIDHGNHE SRAYRALTET IMFDDATERA |
| 361 | GQLTSEEDTL SLVTADHSHV FSFGGYPLRG SSIFGLAPGK ARGRKAYTVL LYGNGRGYVL |
| 421 | KDGARFDVTE SESGSPEYRQ QSAVFLDGET HAGEDVAVFA RGPQAHLVHG VQEQTFIAHV |
| 481 | MAFAACLEPY TACDLAPPAG TTDAAHPGPS VVPALLPLLA GTLLLLGTAT AP |

GENBANK ID: XM_041507.1
VERSION XM_041507.1 GI:14727457
MGCTVSAEDKAAAERSKMIDKNLREDGEKAAREVKLLLLGAGES
GKSTIVEQEKIIREDGVSEEECRQYRAVVYSNTIQSIEAIVKAMGNLQIDFADPSRAD
DARQLFALSCTAEEQGVLFDDLSGVIRRLWADHGVQACFCRSREYQLNDSAAYYLNDL
ERIAQSDYIPTQQDVLRTRVKTTGIVETHFTFKDLHFKEFDVGGQRSERKKWIHCFEG
VIAIIFCVALSAYDLVLAEDEEMNRNNESMKLFDSICNNKWFTDTSIILFLNKKDLFE
EKITHSPLTICFPEVTGANKYDEAASYIQSKFEDLNKRKDTKEIVTHFTCATDTKNVQ
FVFDAVTDVIIKNNLKDCGLF
GENBANK ID: NM_001032.2
VERSION NM_001032.2 GI:13904868
MGHQQLYESHPRKFGQGSRSCRVCSNRHGLIRKVGLNMCRQCFR
QYAKDIGFIKLD
GENBANK ID: M22430.1
VERSION M22430.1 GI:190888
MKTLLLLAVIMIFGLLQAHGNLVNFHRNIKLTTGKEAALSVGFY
GCHCGVGGRGSPKDATDRCCVTNDCCYKRLEKRGCGTKFLSYKFSNSGSRITCAKQDS
CRSQLCECDKAAATCFARNKTTYNKKYQYYSNKHCRGSTPRC
GENBANK ID: X63527
VERSION X63527.1 GI:36127
MSNLRLQKRLASSVLRC0KKKVELDPNETNEIANANSRQQIRKL
IRDGLIIRKPVTVHSRARCRKNTLARRKGRHMGIGKRKGTANARMPEKVTENRRMRIL
RRLLRRYRESKKIDRHNYHSLYLKVK0NVFKNKRILNEHIHKLKADKARKKLLADQAE
[sequence omitted]
GENBANK ID: AF099644.1
VERSION AF099644.1 GI:4323527
MAQFAFESDLHSLLQLDAPIPNAPPARWGRKAKEAAGFAFSPMR
AANRSHSAGRTPGRTPGKSSSKVQTTPSKFGGDRVIFHRSAAQMEVASFLLSKENQFE
NSQTPTKKEHQKAWALNLNGFDVEEAKILRLSGKPQNAPEGYQNRLKVLYSQKATPGS
SRKICRVIPSLPDRILDAPEIRNDYYLNLVDWSSGNVLAVALDNSVVLWSASSGDILQ
LLQMEQPGEYISSVAWIKEGNYLAVGTSSAEVQLWDVQQQKRLRNMTSHSARVGSLSW
NSYILSSGSRSGHIHHHDVRVAEHHVATLSGHSGEVCGLRWAPDGRHLASGGNDNLVN
VWPSAPGEGGEVFLQTFTQHQGAVKAVAECPWQSNVLATGGGTSDRHIRIENVCSGAC
LSAVDAHSQVCSILWSPHYKELISGHGFAQNQLVIWKYPTMAKVAELKGHTSRVLSLT
MSPDGATVASAAADETLRLWRCFELDPARRREREKASAAKSSLIHQGIR
GENBANK ID: X51466
VERSION X51466.1 GI:31105
MVNFTVDQIRAIMDKKANIRNMSVIAHVDHGKSTLTDSLVCKAG
IIASARAGETRFTDTRKDEQERCITIKSTAISLFVELSENDLNFIKQSKDGAGFLINL
IDSPGMVDFSSEVTAALRVTDGALVVVDCVSGVCVQTETVLRQAIAERIKPVLMMNKM
DRALLELQLEPEELYQTFQRIVENVNVIISTYGEGESGPMGNIMIDPVLGTVGFGSGL
HGMAFTLKQFAEMYVAKFAAKGEGQLGPAERAKKVEDMMKKLWGDRYFDFANGKFSKS
ATSPEGKKLPRTFCQLILDPIFKVFDAIMNFKKEETAKLIEKLDIKLDSEDKDKEGKP
LLKAVMRRWLPAGDALLQMITIHLPSPVTAQKYRCELLYEGPPDDEAAMGIKSCDPKG
PLMMVISKNVPTSDKGRFYAFGRVFSGLVSTGLKVRIMGFNYTFGKKEDLYLKPIQRT
ILMMGRYVEPIEDVFCGNIVGLVGVDGFLVKTGTITTFEHAHNMRVMKFSVSPVVRVA
VEAKNPADLPKLVEGLKRLAKSDPMVQCIIEESGEHIIAGAGELHLEICLKDLEEDHA
CIPIKKSDPVVSYRETVSEESNVLCLSKSPNKHNRLYMKARPFPDGLAEDIDKGEVSA
RQELKQRARVLAEKVEWDVAEARKIMCFGPDGTGPNILTDITKGVQYLNEIKDSVVAG
FQWATKEGALCEENMRGVRFDVMDVTLMADAIHRGGGQIIPTARRCLYASVLTAQPRL
MEPIVLVEIQCPEQVVGGIVGVLNRKRGHVFEESQVAGTPMFVVKAYLPVNESFGFTA
DLRSNTGGQAFPQCVFDHWQILPGDPFDNSSRPSQVVAETRKRKGLKKGIPALDNFLD
GENBANK ID: M15661
VERSION M15661.1 GI:337577
MVNVPKTRRTFCKKCGKHQPHKVTQYKKGKDSLYAQGRRRYDRK
QSGYGGQTKPIFRKKAKTTKKIVLRLECVEPNCRSKRMLAIKRCKHFELGGDKKRKGQ
VIQF
GENEANK ID: J04823.1
VERSION J04823.1 GI:1311703
MSVLTFLLLRGLTGSARRLPVPRAKIHSLPPEGKLGINELAVGL
TSCFVTFLLPAGWILSHLETYRRPE
GENBANK ID: NM_001760.2
VERSION NM_001760.2 GI:16950657
MELLCCEGTRHAPRAGPDPRLLGDQRVLQSLLRLEERYVPRASY
FQCVQREIKPHMRKMLAYWMLEVCEEQRCEEEVFPLANNYLDRYLSCVPTRKAQLQLL
GAVCMLLASKLRETTPLTIEKLCIYTDHAVSFRQLRDWEVLVLGKLKWDLAAVIAHDF
LAFILHRLSLPRDRQALVKKHAQTFLALCATDYTFAMYPPSMIATGSIGAAVQGLGAC
SMSGDELTELLAGITGTEVDCLRACQEQIEAALRESLREASQTSSSPAPKABRGSSSQ
GPSQTSTPTDVTAIHL
GENBANK ID: NM_002625.1
DEFINITION HOMO SAPIENS 6-PHOSPHOFRUCTO-2-KINASEFRUCTOSE-2,6-BIPHOSPHA-
TASE 1
(PFKFB1), MRNA.
VERSION NM_002625.1 GI:4505744
CDS 80..1495

| | |
|---|---|
| 1 | GAATTCCGGA CAGGTAGTAA GATAGGAAGT GAGGCCAGGT ACCTTGTGGG CAGTGATGTC |
| 61 | ATTCGGTGCG ACTCCTAAGA TGTCTCCAGA GATGGGAGAG CTCACCCAAA CCAGGTTGCA |
| 121 | GAAGATCTGG ATTCCACACA GCAGCGGCAG CAGCAGGCTG CAACGGAGAA GGGGCTCATC |
| 181 | CATACCCCAG TTTACCAATT CCCCCACAAT GGTGATCATG GTGGGTTTAC CAGCTCGAGG |
| 241 | CAAGACCTAT ATCTCCACAA AGCTCACACG ATATCTCAAC TGGATAGGAA CACCAACTAA |
| 301 | AGTGTTTAAT TTAGGCCAGT ATCGACGAGA GGCAGTGAGC TACAAGAACT ATGAATTCTT |
| 361 | TCTTCCAGAC AACATGGAAG CCCTGCAAAT CAGGAAGCAG TGCGCCCTGG CAGCCCTGAA |
| 421 | GGATGTTCAC AACTATCTCA GCCATGAGGA AGGTCATGTT GCGGTTTTTG ATGCCACCAA |
| 481 | CACTACCAGA GPACGACGGT CACTGATCCT GCAGTTTGCA AAAGAACATG GTTACAAGGT |
| 541 | GTTTTTCATT GAGTCCATTT GTAATGACCC TGGCATAATT GCAGAAAACA TCAGGCAAGT |
| 601 | GAAACTTGGC AGCCCTGATT ATATAGACTG TGACCGGGAA AAGGTTCTGG AAGACTTTCT |
| 661 | AAAGAGAATT GAGTGCTATG AGGTCAACTA CCAACCCTTG GATGAGGAAC TGGACAGCCA |
| 721 | CCTGTCCTAC ATCAAGATCT TCGACGTGGG CACACGCTAC ATGGTGAACC GAGTGCAGGA |
| 781 | TCACATCCAG AGCCGCACAG TCTACTACCT CATGAATATC CATGTCACAC CTCGCTCCAT |
| 841 | CTACCTTTGC CGACATGGCG AGAGTGAACT CAACATCAGA GGCCGCATCG GAGGTGACTC |
| 901 | TGGCCTCTCA GTTCGCGGCA AGCAGTATGC CTATGCCCTG GCCAACTTCA TTCAGTCCCA |
| 961 | GGGCATCAGC TCCCTGAAGG TGTGGACCAG TCGCATGAAG AGGACCATCC AGACAGCTGA |
| 1021 | GGCCCTGGGT GTCCCCTATG AGCAGTGGAA GGCCCTGAAT GAGATTGATG CGGGTGTCTG |
| 1081 | TGAGGAGATG ACCTATGAAG AAATCCAGGA ACATTACCCT GAAGAATTTG CACTGCGAGA |
| 1141 | CCAAGATAAA TATCGCTACC GCTATCCCAA GGGAGAGTCC TATGAGGATC TGGTTCAGCG |
| 1201 | TCTGGAGCCA GTGATAATGG AGCTAGAACG ACAGGAGAAT GTACTGGTGA TCTGCCACCA |
| 1261 | GGCTGTCATG CGGTGCCTCC TGGCCTATTT CCTGGATAAA AGTTCAGATG AGCTTCCATA |
| 1321 | TCTCAAGTGC CCTCTGCACA CAGTGCTCAA ACTCACTCCT GTGGCTTATG GCTGCAAAGT |
| 1381 | GGAATCCATC TACCTGAATG TGGAGGCCGT GAACACACAC CGGGAGAAGC CTGAGAATGT |
| 1441 | GGACATCACC CGGGAACCTG AGGAAGCCCT GGATACTGTC CCAGCCCACT ACTGAGCGCT |
| 1501 | TTCCAAGAAG TCAAACTGCC TGTGTCCTCA TCGCCTTCCA CCTTTAGGAA ATGCTATCTT |
| 1561 | TGCTCTTCTC CTACTCTGCC TTGGCCTCAC TGAGGCACCC CACTTCCAGT GAAGAAGTCC |
| 1621 | TCCGCAACTC CCAAACAAGC CTCGCTTGCT GGCCGCAACC AAGGAGCTAT CTAGCTCTGG |
| 1681 | AGGAAACTTT CTTTCTTAAT TCCTATTCTC TGACGAATAA AGACTTACTG CCTACAAGAG |
| 1741 | G |

GENBANK ID: D00760
DEFINITION HUMAN MRNA FOR PROTEASOME SUBUNIT HC3.
VERSION D00760.1 GI:220023
CDS 1..705
/CODON_START=1

| | |
|---|---|
| 1 | ATGGCGGAGC GCGGGTACAG CTTTTCGCTG ACTACATTCA GCCCGTCTGG TAAACTTGTC |
| 61 | CAGATTGAAT ATGCTTTGGC TGCTCTAGCT GGAGGAGCCC CGTCCGTGGG AATTAAAGCT |
| 121 | GCAAATGCTG TGGTATTAGC AACTGAGAAA AAACAGAAAT CCATTCTGTA TGATGACCGA |
| 181 | AGTGTACACA AAGTAGAACC AATTACCAAG CATATAGGTT TGGTGTACAG TGGCATGGGC |
| 241 | CCCGATTACA GAGTGCTTGT GCACAGAGCT CGAAAACTAG CTCAACAATA CTATCTTGTG |
| 301 | TACCAAGAAC CCATTCCTAC AGCTCAGCTG GTACAGAGAG TAGCTTCTGP CATGCAAGAA |
| 361 | TATACTCAGT CAGGTGGTGT TCGTCCATTT GGAGTTTCTT TACTTATTTG TGGTTGGAAT |
| 421 | GACGGACCAC CATATTTATT TCAGTCAGAT CCATCTGGAG CTTACTTTGC CTGGAAAGCT |
| 481 | ACACCAATGG GAAAGAACTA TGTGAATCGG AAGACTTTCC TTGAGAAAAG ATATAATGAA |
| 541 | GATCTGGAAC TTGAAGATGC CATTCATACA GCCATCTTAA CCCTAAAGGA AAGCTTTGAA |
| 601 | GGGCAAATGA CAGAGGATAA CATAGAAGTT GGAATCTGCA ATGAAGCTGG ATTTAGGAGG |
| 661 | CTTACTCCAA CTGAAGTTAA GGATTACTTG GCTGCCATAG CATAACAATG AAGTGACTGA |
| 721 | AAAATCCAGA ATTTCAGATA ATCTATCTAC TTAAACATGT TTAAAGTATG TTTTGTTTTG |
| 781 | CAGACTTTTT GCATACTTAT TTCTACATGG TTTAAATCGA CTGTTTTTAA AATGACACTT |
| 841 | ATAAATCCTA ATAAACTGTT AAACCC |

GENBANK ID: P10644
GENBANK ID: XM_043948.2
DEFINITION HOMO SAPIENS ALDOLASE A, FRUCTOSE-BISPHOSPHATE (ALDOA), MRNA.
VERSION XM_043948.2 GI:18585537
CDS 243..1349
/CODON_START=1

| | |
|---|---|
| 1 | AAAAACCAGG GCTCCAGAGA ATCAGAACAG CCACCATCAC CGCAGGGAGT CAAGGGAGGA |
| 61 | GGGAGATTAG AGAAGGAGCC AGGGAGGGTG GCAGGGAGGC CACGTGATCC GAGTCCCCTC |
| 121 | ACCCCTTTCC TTCCCACAGG TCCCTGGCCA AAGATTTATT TCTCTTGACA ACCAAGGGCC |
| 181 | TCCGTCTGGA TTTCCAAGGA AGAATTTCCT CTGAAGCACC GGAACTTGCT ACTACCAGCA |
| 241 | CCATGCCCTA CCAATATCCA GCACTGACCC CGGAGCAGAA GAAGGAGCTG TCTGACATCG |
| 301 | CTCACCGCAT CGTGGCACCT GGCAAGGGCA TCCTGGCTGC AGATGAGTCC ACTGGGAGCA |
| 361 | TTGCCAAGCG GCTGCAGTCC ATTGGCACCG AGAACACCGA GGAGAACCGG CGCTTCTACC |
| 421 | GCCAGCTGCT GCTGACAGCT GACGACCGCG TGAACCCCTG CATTGGGGGT GTCATCCTCT |
| 481 | TCCATGAGAC ACTCTACCAG AAGGCGGATG ATGGGCGTCC CTTCCCCCAA GTTATCAAAT |
| 541 | CCAAGGGCGG TGTTGTGGGC ATGAAGGTAG ACAAGGGCGT GGTCCCCCTG GCAGGGACAA |
| 601 | ATGGCGAGAC TACCACCCAA GGGTTGGATG GGCTGTCTGA GCGCTGTGCC CAGTACAAGA |
| 661 | AGGACGGAGC TGACTTCGCC AAGTGGCGTT GTGTGCTGAA GATTGGGGAA CACACCCCCT |
| 721 | CAGCCCTCGC CATCATGGAA AATGCCAATG TTCTGGCCCG TTATGCCAGT ATCTGCCAGC |
| 781 | AGGTGGGCCT GCAGAATGGC ATTGTGCCCA TCGTGGAGCC TGAGATCCTC CCTGATGGGG |
| 841 | ACCATGACTT GAAGCGCTGC CAGTATGTGA CCGAGAAGGT GCTGGCTGCT GTCTACAAGG |
| 901 | CTCTGAGTGA CCACCACATC TACCTGGAAG GCACCTTGCT GAAGCCCAAC ATGGTCACCC |
| 961 | CAGGCCATGC TTGCACTCAG AAGTTTTCTC ATGAGGAGAT TGCCATGGCG ACCGTCACAG |
| 1021 | CGCTGCGCCG CACAGTGCCC CCCGCTGTCA CTGGGATCAC CTTCCTGTCT GGAGGCCAGA |
| 1081 | GTGAGGAGGA GGCGTCCATC AACCTCAATG CCATTAACAA GTGCCCCCTG CTGAAGCCCT |
| 1141 | GGGCCCTGAC CTTCTCCTAC GGCCGAGCCC TGCAGGCCTC TGCCCTGAAG GCCTGGGGCG |
| 1201 | GGAAGAAGGA GAACCTGAAG GCTGCGCAGG AGGAGTATGT CAAGCGAGCC CTGGCCAACA |
| 1261 | GCCTTGCCTG TCAAGGAAAG TACACTCCGA GCGGTCAGGC TGGGGCTGCT GCCAGCGAGT |
| 1321 | CCCTCTTCGT CTCTAACCAC GCCTATTAAG CGGAGGTGTT CCCAGGCTGC CCCCAACACT |
| 1381 | CCAGGCCCTG CCCCCTCCCA CTCTTGAAGA GGAGGCCGCC TCCTCGGGGC TCCAGGCTGG |
| 1441 | CTTGCCCGCG CTCTTTCTTC CCTCGTGACA GTGGTGTGTG GTGTCGTCTG TGAATGCTAA |
| 1501 | GTCCATCACC CTTTCCGGCA CACTGCCAAA TAAACAGCTA TTTAAGGGGG |

GENBANK ID: NM_005175.1
DEFINITION HOMO SAPIENS ATP SYNTHASE, H+TRANSPORTING, MITOCHONDRIAL F0
COMPLEX, SUBUNIT C (SUBUNIT 9), ISOFORM 1 (ATP5G1), MRNA.
VERSION NM_005175.1 GI:4885080
CDS 120..530
/CODON_START=1

| | |
|---|---|
| 1 | GGGGAAGCTG AGGGCTGAGA CCAAGGGCTA AAGCTGGGAG GTGAGTCTGT CACCTTGAGC |
| 61 | CGGGCGAGCG CTGTGGGCCA AGCAGGGGTT GCAGGGCAGT AGGAGTGCAG ACTGAAAAAA |
| 121 | TGCAGACCGC CGGGGCATTA TTCATTTCTC CAGCTCTGAT CCGCTGTTGT ACCAGGGGTC |
| 181 | TAATCAGGCC TGTGTCTGCC TCCTTCTTGA ATAGCCCAGT GAATTCATCT AAACAGCCTT |
| 241 | CCTACAGCAA CTTCCCACTC CAGGTGGCCA GACGGGAGTT CCAGACCAGT GTTGTCTCCC |
| 301 | GGGACATTGA CACAGCAGCC AAGTTTATTG GTGCTGGGGC AGCCACAGTT GGTGTGGCTG |
| 361 | GTTCAGGGGC TGGCATTGGA ACCGTGTTTG GCAGCTTGAT CATTGGCTAT GCCAGGAACC |
| 421 | CGTCTCTCAA GCAGCAGCTC TTCTCCTATG CCATTCTTGG CTTTGCCCTG TCTGAGGCCA |
| 481 | TGGGGCTTTT CTGTTTGATG GTCGCCTTCC TCATCCTCTT CGCCATGTGA GGCTCCATGG |
| 541 | GGGGTCACCG GCCTGTTGCT ACTGCAACTC CACACCATTC TTGGTGCTGC GGTGTGTTAA |
| 601 | GCTTTACCAT TAAACACAAC GTTTCTCTAA A |

GENBANK ID: M20496.1
DNA LINEAR
DEFINITION HUMAN CATHEPSIN L GENE, COMPLETE CDS.
VERSION M20496.1 GI:809235
CDS 134..1135
/CODON_START=1

| | |
|---|---|
| 1 | ACCTCCACGT GCCCTGTTTT TCTGGAGGCA CATCCTTGGC CTCTTCCACA GTCCTTGGGT |
| 61 | AAATGCTTGG GAGAATAATT TAAATATTTT TATTGTACCA TGGTGGCCCT AATTTTTCAG |
| 121 | GGGGCAGTAA GATATGAATC CTACACTCAT CCTTGCTGCC TTTTGCCTGG GAATTGCCTC |
| 181 | AGCTACTCTA ACATTTGATC ACAGTTTAGA GGCACAGTGG ACCAAGTGCA AGGCGATGCA |
| 241 | CAACAGATTA TACGGCATGA ATGAAGAAGG ATGGAGGAGA GCAGTGTGGG AGAAGAACAT |
| 301 | GAAGATGATT GAACTGCACA ATCAGGAATA CAGGGAAGGG AAACACAGCT TCACAATGGC |
| 361 | CATGAACGCC TTTGGAGACA TGACCAGTGA AGAATTCAGG CAGGTGATGA ATGGCTTTCA |
| 421 | AAACCGTAAG CCCAGGAAGG GGAAAGTGTT CCAGGAACCT CTGTTTTATG AGGCCGCCAG |
| 481 | ATCTGTGGAT TGGAGAGAGA AAGGCTACGT GACTCCTGTG AAGAATCAGG GTCAGTGTGG |
| 541 | TTCTTGTTGG GCTTTTAGTG CTACTGGTGC TCTTGAAGGA CAGATGTTCC GGAAAACTGC |
| 601 | GAGGCTTATC TCACTGAGTG AGCAGAATCT GGTAGACTGC TCTGGGCCTC AAGGCAATGA |
| 661 | AGGCTGCAAT GGTGGCCTAA TGGATTATGC TTTCCAGTAT GTTCAGGATA ATGGAGGCCT |
| 721 | GGACTCTGAG GAATCCTATC CATATGAGGC AACAGAAGAA TCCTGTAAGT ACAATCCCAA |
| 781 | GTATTCTGTT GCTAATGACA CCGGCTTTGT GGACATCCCT AAGCAGGAGA AGGCCCTGAT |
| 841 | GAAGGCAGTT GCAACTGTGG GGCCCATTTC TGTTGCTATT GATGCAGGTC ATGAGTCCTT |
| 901 | CCTGTTCTAT AAAGAAGGCA TTTATTTTGA GCCAGACTGT AGCAGTGAAG ACATGGATCA |
| 961 | TGGTGTGCTG GTGGTTGGCT ACGGATTTGA AAGCACAGAA TCAGATAACA ATAAATATTG |
| 1021 | GCTGGTGAAG AACAGCTGGG GTGAAGAATG GGGCATGGGT GGCTACGTAA AGATGGCCAA |
| 1081 | AGACCGGAGA AACCATTGTG GAATTGCCTC AGCAGCCAGC TACCCCACTG TGTGAGCTGT |
| 1141 | GGACGGTGAT GAGGAAGGAC TTGACTGGGG ATGGCGCATG CATGGGAGGA ATTCTTCAGT |
| 1201 | CTACCAGCCC CCGCTGTGTC GGATACACAC TCGAATCATT GAAGATCCGA GTGTGATTTG |
| 1261 | AATTCTGTGA TATTTTCACA CTGGTAAATG TTACCTCTAT TTTAATTACT GCTATAAATA |
| 1321 | GGTTTATATT ATTGATTCAC TTACTGACTT TGCATTTTCG TTTTTAAAAG GATGTATAAA |
| 1381 | TTTTTACCTG TTTAAATAAA ATCG |

GENBANK ID: XM_031596.3
DEFINITION HOMO SAPIENS ANNEXIN A4 (ANXA4), MRNA.
VERSION XM_031596.3 GI:18553329
CDS 48..770
/CODON_START=1

| | |
|---|---|
| 1 | GAAGAACTTC TGCTTGGGTG GCTGAACTCT GATCTTGACC TAGAGTCATG GCCATGGCAA |
| 61 | CCAAAGGAGG TACTGTCAAA GCTGCTTCAG GATTCAATGC CATGGAAGAT GCCCAGACCC |
| 121 | TGAGGAAGGC CATGAAAGGG CTCGGCACCG ATGAAGACGC CATTATTAGC GTCCTTGCCT |
| 181 | ACCGCAACAC CGCCCAGCGC CAGGAGATCA GGACAGCCTA CAAGAGCACC ATCGGCAGGG |
| 241 | ACTTGATAGA CGACCTGAAG TCAGAACTGA GTGGCAACTT CGAGCAGGTG ATTGTGGGGA |
| 301 | TGATGACGCC CACGGTGCTG TATGACGTGC AAGAGCTGCG AAGGGCCATG AAGGGAGCCG |
| 361 | GCACTGATGA GGGCTGCCTA ATTGAGATCC TGGCCTCCCG GACCCCTGAG GAGATCCGGC |
| 421 | GCATAAGCCA AACCTACCAG CAGCAATATG GACGGAGCCT TGAAGATGAC ATTCGCTCTG |
| 481 | ACACATCGTT CATGTTCCAG CGAGTGCTGG TGTCTCTGTC AGCTGGTGGG AGGGATGAAG |
| 541 | GAAATTATCT GGACGATGCT CTCGTGAGAC AGGATGCCCA GGACCTGTAT GAGGCTGGAG |
| 601 | AGAAGAAATG GGGGACAGAT GAGGTGAAAT TTCTAACTGT TCTCTGTTCC CGGAACCGAA |
| 661 | ATCACCTGTT GCATGGTTTG ATGAATACAA AAGGATATCA CAGAAGGATA TTGAACAGAG |
| 721 | TATTAAATCT GAAACATCTG GTAGCTTTGA AGATGCTCTG CTGGCTATAG TAAAGTGCAT |
| 781 | GAGGAACAAA TCTGCATATT TTGCTGAAAA GCTCTATAAA TCGATGAAGG GCTTGGGCAC |
| 841 | CGATGATAAC ACCCTCATCA GAGTGATGGT TTCTCGAGCA GAAATTGACA TGTTGGATAT |
| 901 | CCGGGCACAC TTCAAGAGAC TCTATGGAAA GTCTCTGTAC TCGTTCATCA AGGGTGACAC |
| 961 | ATCTGGAGAC TACAGGAAAG TACTGCTTGT TCTCTGTGGA GGAGATGATT AAAATAAAAA |
| 1021 | TCCCAGAAGG ACAGGAGGAT TCTCAACACT TTGAATTTTT TTAACTTCAT TTTTCTACAC |
| 1081 | TGCTATTATC ATTATCTCAG AATGCTTATT TCCAATTAAA ACCGCTACAG CTGCCTCCTA |
| 1141 | GAATATAGAC TGTCTGTATT ATTATTGACG TATAATTAGT CATTATGATG CTTTAAAGCT |
| 1201 | GTACTTGCAT TTCAAAGCTT ATAAGATATA AATGGAGATT TTAAAGTAGA AATAAATATG |
| 1261 | TATTCCATGT TTTTAAAAGA TTACTTTCTA CTTTGTCTTT CACAGACATT GAATATATTA |
| 1321 | AATTATTCCA TATTTTCTTT TCAGTGAAAA ATTTTTTAAA TGGAAGACTG TTCTAAAATC |
| 1381 | ACTTTTTTCC CTAATCCAAT TTTTAGAGTG GCTAGTAGTT TCTTCATTTG AAATTGTAAG |
| 1441 | CATCCGGTCA GTAAGAATGC CCATCCAGTT TTCTATATTT CATAGTCAAA GCCTTGAAAG |
| 1501 | CATCTACAAA TCTCTTTTTT TAGGTTTTGT CCATAGCATC AGTTGATCCT TACTAAGTTT |
| 1561 | TTCATGGGAG ACTTCCTTCA TCACATCTTA TGTTGAAATC ACTTTCTGTA GTCAAAGTAT |
| 1621 | ACCAAAACCA ATTTATCTGA ACTAAATTCT AAAGTATGGT TATACAAACC ATATACATCT |
| 1681 | GGTTACCAAA CATAAATGCT GAACATTCCA TATTATTATA GTTAATGTCT TAATCCAGCT |
| 1741 | TGCAAGTGAA TGGAAAAAAA AATAAGCTTC AAACTAGGTA TTCTGGGAAT GATGTAATGC |
| 1801 | TCTGAATTTA GTATGATATA AAGAAAACTT TTTTGTGCTA AAAATACTTT TTAAAATCAA |
| 1861 | TTTTGTTGAT TGTAGTAATT TCTATTTGCA CTGTGCCTTT CAACTCCAGA AACATTCTGA |
| 1921 | AGATGTACTT GGATTTAATT AAAAAGTTCA CTTTGT |

GENBANK ID: M22865.1
DEFINITION HUMAN CYTOCHROME B5 MRNA, COMPLETE CDS.
VERSION M22865.1 GI:181226
53..457
CODON_START=1

| | |
|---|---|
| 1 | CAGCCAGCTC GACGGGGCTG TGTGTGCTGG GCCTGGCTCG CGGCGAACCG AGATGGCAGA |
| 61 | GCAGTCGGAC GAGGCCGTGA ACTACTACAC CCTAGAGGAG ATTCAGAAGC ACAACCACAG |
| 121 | CAAGAGCACC TGGCTGATCC TGCACCACAA GGTGTACGAT TTGACCAAAT TTCTGGAAGA |
| 181 | GCATCCTGGT GGGGAAGAAG TTTTAAGGGA ACAAGCTGGA GGTGACGCTA CTGAGAACTT |
| 241 | TGAGGATGTC GGGCACTCTA CAGATGCCAG GGAAATGTCC AAAACATTCA TCATTGGGGA |
| 301 | GCTCCATCCA GATGACAGAC CAAAGTTAAA CAAGCCTCCG GAAACTCTTA TCACTACTAT |
| 361 | TGATTCTAGT TCCAGTTGGT GGACCAACTG GGTGATCCCT CCCATCTCTG CAGTGGCCGT |
| 421 | CGCCTTGATG TATCGCCTAT ACATGGCAGA GGACTGAACA CCTCCTCAGA AGTCAGCGCA |
| 481 | GGCCGAGCCT GCTTTGGACA CGGGAGAAAA GAAGCCATTG CTAACTACTT CAACTGACAG |
| 541 | AAACCTTCAC TTGAAAACAA TGATTTTAAT ATATCTCTTT CTTTTTCTTC CGACATTAGA |
| 601 | AACAAAACAA AAAGAACTGT CCTTTCTGCG CTCAAATTTT TCGAGTGTGC CTTTTTATTC |
| 661 | ATCTACTTTA TTTTGATGTT TCCTTAATGT GTAATTTACT TATTATAAGC ATCATCTTTT |
| 721 | AAAAATATAT TTGGCTTTTA AAG |

GENBANK ID: M14362.1
DEFINITION HUMAN T-CELL SURFACE ANTIGEN CD2 (T11) MRNA, COMPLETE CDS.
VERSION M14362.1 GI:179133
CDS 10..1065
/CODON_START=1

| | |
|---|---|
| 1 | ACCCCTAAGA TGAGCTTTCC ATGTAAATTT GTAGCCAGCT TCCTTCTGAT TTTCAATGTT |
| 61 | TCTTCCAAAG GTGCAGTCTC CAAAGAGATT ACGAATGCCT TGGAAACCTG GGGTGCCTTG |
| 121 | GGTCAGGACA TCAACTTGGA CATTCCTAGT TTTCAAATGA GTGATGATAT TGACGATATA |
| 181 | AAATGGGAAA AAACTTCAGA CAAGAAAAAG ATTGCACAAT TCAGAAAAGA GAAAGAGACT |
| 241 | TTCAAGGAAA AAGATACATA TAAGCTATTT AAAAATGGAA CTCTGAAAAT TAAGCATCTG |
| 301 | AAGACCGATG ATCAGGATAT CTACAAGGTA TCAATATATG ATACAAAAGG AAAAAATGTG |
| 361 | TTGGAAAAAA TATTTGATTT GAAGATTCAA GAGAGGGTCT CAAAACCAAA GATCTCCTGG |
| 421 | ACTTGTATCA ACACAACCCT GACCTGTGAG GTAATGAATG GAACTGACCC CGAATTAAAC |
| 481 | CTGTATCAAG ATGGGAAACA TCTAAAACTT TCTCAGAGGG TCATCACACA CAAGTGGACC |
| 541 | ACCAGCCTGA GTGCAAAATT CAAGTGCACA GCAGGGAACA AAGTCAGCAA GGAATCCAGT |
| 601 | GTCGAGCCTG TCAGCTGTCC AGAGAAAGGT CTGGACATCT ATCTCATCAT TGGCATATGT |
| 661 | GGAGGAGGCA GCCTCTTGAT GGTCTTTGTG GCACTGCTCG TTTTCTATAT CACCAAAAGG |
| 721 | AAAAAACAGA GGAGTCGGAG AAATGATGAG GAGCTGGAGA CAAGAGCCCA CAGAGTAGCT |
| 781 | ACTGAAGAAA GGGGCCGGAA GCCCCACCAA ATTCCAGCTT CAACCCCTCA GAATCCAGCA |
| 841 | ACTTCCCAAC ATCCTCCTCC ACCACCTGGT CATCGTTCCC AGGCACCTAG TCATCGTCCC |
| 901 | CCGCCTCCTG GACACCGTGT TCAGCACCAG CCTCAGAAGA GGCCTCCTGC TCCGTCGGGC |
| 961 | ACACAAGTTC ACCAGCAGAA AGGCCCGCCC CTCCCCAGAC CTCGAGTTCA GCCAAAACCT |
| 1021 | CCCCATGGGG CAGCAGAAAA CTCATTGTCC CCTTCCTCTA ATTAAAAAAG ATAGAAACTG |
| 1081 | TATTTTTCAA TAAAAAGCAC TGTGGATTTC TGCCCTCCTG ATGTGCATAT CCGTACTTCC |
| 1141 | ATGAGGTGTT TTCTGTGTGC AGAACATTGT CACCTCCTGA GGCTGTGGGC CACAGCCACC |
| 1201 | TCTGCATCTT CGAACTCAGC CATGTGGTCA ACATCTGGAG TTTTTGGTCT CCTCAGAGAG |
| 1261 | CTCCATCACA CCAGTAAGGA GAAGCAATAT AAGTGTGATT GCAAGAATGG TAGAGGACCG |
| 1321 | AGCACAGAAA TCTTAGAGAT TTCCTGTCCC CTCTCAGGTC ATGTGTAGAT GCGATAAATC |
| 1381 | AAGTGATTGG TGTGCCTGGG TCTCACTACA AGCAGCCTAT CTGCTTAAGA GACTCTGGAG |
| 1441 | TTTCTTATGT GCCCTGGTGG ACACTTGCCC ACCATCCTGT GAGTAAAAGT GAAATAAAAG |
| 1501 | CTTTGACTAG |

GENBANK ID: XM_087746.1
DEFINITION HOMO SAPIENS SIMILAR TO KIDNEY ANINOPEPTIDASE N; LEUCINE
ARYLANINOPEPTIDASE 1 (LOC153726), MRNA.
VERSION XM_087746.1 GI:18561749
CDS 262..639
/CODON_START=1

| | |
|---|---|
| 1 | GAGTTCCATG CCACCTCCCC GCCCTTTACA GACATGCTAT AAGGTCCCCA GCCCAGTCAC |
| 61 | TCCGCAGTGC CTCTCTCTTC CTCCCCATGG ACTATACACA GGCCCTGCTT GTCCTGGAGG |
| 121 | AAAGTTTGGA CGTCATTATA TAGAICAGGA GACTGAAGTA CTGAAAGGTT AAATGACTTG |
| 181 | CCAAAGAATG AGATCTTTTT TTCTAACATT TTACATAATA TCCTCAGAGA AGATCACGCC |
| 241 | CTGGTGACTA GAGCTGTGGC CATGAAGGTG GAAAATTTCA AAACAAGTGA AATACAGGAA |
| 301 | CTCTTTGACA TATTTACTTA CAGCAAGGGA GCGTCTATGG CCCGGATGCT TTCTTGTTTC |
| 361 | TTGAATGAGC ATTTATTTGT CAGTGCACTC AAGTCATATT TGAAGACATT TTCCTACTCA |
| 421 | AACGCTGAGC AAGATGATCT ATGGAGGCAT TTTCAAATGG CCATAGATGA GCAGACTACA |
| 481 | GTTATTTTGC CAGCAACAAT AAAAAACATA ATGGACAGGT GGACACACCA GAGTGGTTTT |
| 541 | CCAGTGATCA CTTTAAATGT GTCTACTGGC GTCATGAAAC AGGAGCCATT TTATCTTGAA |
| 601 | AACATTAAAA ATCGGACTCT TCTAACCAGC AATAAGTGAC ACATGGATTG TCCCTATTCT |
| 661 | TTGGATAAAA AATGGAACTA CACAACCTTT AGTCTGGCTA GA |

GENBANK ID: P31749
DEFINITION DICTYOSTELION DISCOIDEUM RAC-ALPHA SERINETHREONINE KINASE
HOMOLOG
MRNA, COMPLETE CDS.
VERSION PU15210.1 GI:1000068
CDS 1..1335
/CODON_START=1

| | |
|---|---|
| 1 | ATGTCAACAG CACCAATTAA ACATGAAGGT TTCCTCACTA AAGAAGGTGG TGGTTTCAAA |
| 61 | AGTTGGAAAA AGAGATGGTT CATTCTCAAA GGTGGTGATT TAAGTTATTA TAAAACAAAA |
| 121 | GGTGAACTTG TACCATTAGG AGTTATTCAT TTAAATACAT CAGGTCATAT TAAAAATTCT |
| 181 | GATCGTAAGA AAAGAGTTAA TGGATTTGAA GTACAAACAC CATCACGTAC ATATTTCTTA |
| 241 | TGTTCAGAGA CAGAGGAAGA ACGTGCAAAA TGGATAGAGA TATTAATTAA TGAAAGAGAA |
| 301 | TTATTATTGA ATGGTGGTAA ACAACCAAAG AAATCGGAAA AGGTAGGAGT TGCAGATTTT |
| 361 | GAATTATTGA ATTTAGTTGG TAAAGGTAGT TTTGGTAAAG TTATTCAAGT TAGAAAGAAA |
| 421 | GATACTGGTG AAGTGTATGC AATGAAAGTT TTATCAAAGA AACATATCGT AGAGCATAAC |
| 481 | GAAGTCGAAC ATACATTGAG TGAGCGTAAT ATTCTTCAAA AGATCAATCA CCCATTTTTG |
| 541 | GTTAATCTCA ACTACAGTTT TCAAACAGAG GATAAGCTTT ACTTTATCTT GGATTATGTT |
| 601 | AATGGTGGTG AGTTATTCTA TCATCTTCAA AAGGACAAAA AGTTTACAGA GGATCGTGTC |
| 661 | CGTTATTATG GCGCAGAGAT CGTATTGGCA TTGGAACATT TACATTTGTC GGGTGTCATC |
| 721 | TATAGAGATT TGAAACCAGA GAATTTACTA CTCACCAACG AGGGTCACAT TTGCATGACC |
| 781 | GATTTCGGTC TTTGCAAAGA GGGTCTATTG ACACCAACCG ACAAAACTGG TACTTTCTGT |
| 841 | GGTACTCCTG AATATTTAGC ACCCGAAGTA CTTCAAGGCA ATGGTTATGG TAAACAAGTG |
| 901 | GATTGGTGGA GTTTTGGTTC TCTCCTCTAT GAAATGCTCA CTGGTTTACC ACCATTCTAC |
| 961 | AATCAAGACG TCCAAGAGAT GTATCGTAAG ATCATGATGG AGAAATTATC TTTCCCACAT |
| 1021 | TTCATTTCTC CAGATGCTCG TTCCCTCTTG GAACAACTCT TGGAAAGAGA TCCTGAAAAA |
| 1081 | AGACTTGCCG ATCCAAATCT TATTAAAAGA CATCCTTTCT TCCGTTCCAT CGATTGGGAA |
| 1141 | CAATTATTCC AAAAGAATAT TCCACCACCA TTCATTCCAA ATGTTAAAGG TTCTGCTGAT |
| 1201 | ACCTCTCAAA TTGATCCAGT TTTCACTGAT GAAGCTCCTT CTTTAACTAT GGCTGGTGAA |
| 1261 | TGTGCTTTAA ATCCGCAACA ACAAAAAGAT TTTGAAGGAT TTACATATGT CGCTGAATCT |
| 1321 | GAACATTTAA GATAA |

GENBANK ID: NM_000102.2
DEFINITION HOMO SAPIENS CYTOCEROME P450, SUBFANILY XVII (STEROID
17-ALPHA--HYDROXYLASE), ADRENAL HYPERPLASIA (CYP17), MRNA.
VERSION NM_000102.2 GI:13904854
CDS 61..1587

| | |
|---|---|
| 1 | GAGTTGCCAC AGCTCTTCTA CTCCACTGCT GTCTATCTTG CCTGCCGGCA CCCAGCCACC |
| 61 | ATGTGGGAGC TCGTGGCTCT CTTGCTGCTT ACCCTAGCTT ATTTGTTTTG GCCCAAGAGA |
| 121 | AGGTGCCCTG GTGCCAAGTA CCCCAAGAGC CTCCTGTCCC TGCCCCTGGT GGGCAGCCTG |
| 181 | CCATTCCTCC CCAGACATGG CCATATGCAT AACAACTTCT TCAAGCTGCA GAAAAAATAT |
| 241 | GGCCCCATCT ATTCTGTTCG TATGGGCACC AAGACTACAG TGATTGTCGG CCACCACCAG |
| 301 | CTGGCCAAGG AGGTGCTTAT TAAGAAGGGC AAGGACTTCT CTGGGCGGCC TCAAATGGCA |
| 361 | ACTCTAGACA TCGCGTCCAA CAACCGTAAG GGTATCGCCT TCGCTGACTC TGGCGCACAC |
| 421 | TGGCAGCTGC ATCGAAGGCT GGCGATGGCC ACCTTTGCCC TGTTCAAGGA TGGCGATCAG |
| 481 | AAGCTGGAGA AGATCATTTG TCAGGAAATC ACTACATTGT GTGATATGCT GGCCACCCAC |
| 541 | AACGGACAGT CCATAGACAT CTCCTTTCCT GTCTTCGTGG CGGTAACCAA TGTCATCTCC |
| 601 | TTGATCTGCT TCAATACCTC CTACAAGAAT GGCGACCCTG AGTTGAATGT CATACAGAAT |
| 661 | TACAATGAAG GCATCATAGA CAACCTCAGC AAACACAGCC TGCTGGACCT AGTCCCCTGG |
| 721 | TTGAAGATTT TCCCCAACAA AACCCTGGAA AAATTAAAGA GCCATGTTAA AATACGAAAT |
| 781 | GATCTGCTGA ATAAAATACT TGAAAATTAC AAGGAGAAAT TCCGGAGTGA CTCTATCACC |
| 841 | AACATGCTGG ACACACTGAT CCAAGCCAAG ATGAACTCAG ATAATGGCAA TGCTGGCCCA |
| 901 | GATCAAGATT CAGAGGTGCT TTCAGATAAC CACATTCTCA CCACCATAGG GGACATCTTT |
| 961 | GGGGCTGGCG TGGAGACCAC CACCTCTGTG GTTAAATGGA CCCTGGCCTT CCTGCTGCAC |
| 1021 | AATCCTCAGG TGAAGAAGAA GCTCTACGAG GAGATTGACC AGAATGTGGG TTTCAGCCGC |
| 1081 | ACACCAACTA TCAGTGACCG TAACCGTCTC CTCCTGCTGG AGGCCACCAT CGGAGAGGTG |
| 1141 | CTTCGCCTCA GGCCCGTGGC CCCTATGCTC ATCCCCCACA AGGCCAACGT TGACTCCAGC |
| 1201 | ATCGGTGAGT TTGCTGTGGA CAAGGGCACA GAAGTTATCA TCAATCTGTG GGCGCTGCAT |
| 1261 | CACAATGAGA AGGAGTGGCA CCAGCCGGAT CAGTTCATGC CTGAGCGTTT CTTGAATCCA |
| 1321 | GCGGGGACCC AGCTCATCTC ACCGTCAGTA AGCTATTTGC CCTTCGGAGC AGGACCTCGC |
| 1381 | TCCTGTATAG GTGAGATCCT GGCCCGCCAG GAGCTCTTCC TCATCATGGC CTGGCTGCTG |
| 1441 | CAGAGGTTCG ACCTGGAGGT GCCAGATGAT GGGCAGCTGC CCTCCCTGGA AGGCATCCCC |
| 1501 | AAGGTGGTCT TTCTGATCGA CTCTTTCAAA GTGAAGATCA AGGTGCGCCA GGCCTGGAGG |
| 1561 | GAAGCCCAGG CTGAGGGTAG CACCTAAAGG CTGTAACTCA CAGCCCCTGT CCACCCTATG |
| 1621 | TGGCCCCACA ACACAGATTT AGAGATACAA CCCCCCACCC TTCTCCGCCA TTCTTCCCTA |
| 1681 | CTCCCAACCC ACTCTGCCTT CTTTTTCAGC TTGTGGCAAT GCCAGTGATG TGCATAAACA |
| 1741 | GTTTTTTTTT TTTCC |

GENBANK ID: NM_001662
DEFINITION HOMO SAPIENS ADP-RIBOSYLATION FACTOR 5 (ARF5), MRNA.
VERSION NM_001662.2 GI:6995999
CDS 37..579
/CODON_START=1

| | |
|---|---|
| 1 | CCGCGTCGGT GCCCGCGCCC CTCCCCGGGC CCCGCCATGG GCCTCACCGT GTCCGCGCTC |
| 61 | TTTTCGCGGA TCTTCGGGAA GAAGCAGATG CGGATTCTCA TGGTTGGCTT GGATGCGGCT |
| 121 | GGCAAGACCA CAATCCTGTA CAAACTGAAG TTGGGGGAGA TTGTCACCAC CATCCCAACC |
| 181 | ATAGGCTTCA ATGTAGAAAC AGTGGAATAT AAGAACATCT GTTTCACAGT CTGGGACGTG |
| 241 | GGAGGCCAGG ACAAGATTCG GCCTCTGTGG CGGCACTACT TCCAGAACAC TCAGGGCCTC |
| 301 | ATCTTTGTGG TGGACAGTAA TGACCGGGAG CGGGTCCAAG AATCTGCTGA TGAACTCCAG |
| 361 | AAGATGCTGC AGGAGGACGA GCTGCGGGAT GCAGTGCTGC TGGTATTTGC CAACAAGCAG |
| 421 | GACATGCCCA ACGCCATGCC CGTGAGCGAG CTGACTGACA AGCTGGGGCT ACAGCACTTA |
| 481 | CGCAGCCGCA CGTGGTATGT CCAGGCCACC TGTGCCACCC AAGGCACAGG TCTGTACGAT |
| 541 | GGTCTGGACT GGCTGTCCCA CGAGCTGTCA AAGCGCTAAC CAGCCAGGGG CAGGCCCCTG |
| 601 | ATGCCCGGAA GCTCCTGCGT GCATCCCCGG GATGACCAGA CTCCCGGACT CCTCAGGCAG |
| 661 | TGCCCTTTCC TCCCACTTTT CCTCCCCCAT AGCCACAGGC CTCTGCTCCT GCTCCTGCCT |
| 721 | GCATGTTCTC TCTGTTGTTG GAGCCTGGAG CCTTGCTCTC TGGGCACAGA GGGGTCCACT |
| 781 | CTCCTGCCTG CTGGGACCTA TGGAAGGGGC TTCCTGGCCA AGGCCCCCTC TTCCAGAGGA |
| 841 | GGAGCAGGGA TCTGGGTTTC CTTTTTTTTT TCTGTTTTGG GTGTACTCTA GGGGCCAGGT |
| 901 | TGGGAGGGGG AAGGTGAGGG CTTCGGGTGG TGCTATAATG TGGCACTGGA TCTTGAGTAA |
| 961 | TAAATTTGCT GTGGTTTG |

GENBANK 10: XM_048886.3
DEFINITION HOMO SAPIENS MICROSOMAL GLUTATHIONE 5-TRANSFERASE 1
(MGST1), MRNA.
VERSION XM_048886.3 GI:18580621
CDS 89..556
/CODON_START=1

| | |
|---|---|
| 1 | AGTCCCTGCA TTGCGCGCGA CCCGGCGGCG GGACAGGCTT GCTGCTTCCT CCTCCTCGGC |
| 61 | CTCACCATTC CAGACCAAAA TTGAAAAAAT GGTTGACCTC ACCCAGGTAA TGGATGATGA |
| 121 | AGTATTCATG GCTTTTGCAT CCTATGCAAC AATTATTCTT TCAAAAATGA TGCTTATGAG |
| 181 | TACTGCAACT GCATTCTATA GATTGACAAG AAAGGTTTTT GCCAATCCAG AAGACTGTGT |
| 241 | AGCATTTGGC AAAGGAGAAA ATGCCAAGAA GTATCTTCGA ACAGATGACA GAGTAGAACG |
| 301 | TGTACGCAGA GCCCACCTGA ATGACCTTGA AAATATTATT CCATTTCTTG GAATTGGCCT |
| 361 | CCTGTATTCC TTGAGTGGTC CCGACCCCTC TACAGCCATC CTGCACTTCA GACTATTTGT |
| 421 | CGGAGCACGG ATCTACCACA CCATTGCATA TTTGACACCC CTTCCCCAGC CAAATAGAGC |
| 481 | TTTGAGTTTT TTTGTTGGAT ATGGAGTTAC TCTTTCCATG GCTTACAGGT TGCTGAAAAG |
| 541 | TAAATTGTAC CTGTAAAGAA AATCATACAA CTCAGCATCC AGTTGGCTTT TTAAGAATTC |
| 601 | TGTACTTCCA ATTTATAATG AATACTTTCT TAGATTTTAG GTAGGAGGGG AGCAGAGGAA |
| 661 | TTATGAACTG GGGTAAACCC ATTTTGAATA TTAGCATTGC CAATATCCTG TATTCTTGTT |
| 721 | TTACATTTGG ATTAGAAATT TAACATAGTA ATTCTTAAGT CTTTTGTCTG ATTTTTAAAG |
| 781 | TACTTTCTTA TAAATTTGGA TCATGTTATG ATTTGTAACA TTCACACAAC ACCTCACTTT |
| 841 | TGAATCTATA AAAGAATTGC ACGTATGAGA AACCTATATT TCAATACTGC TGAAACAGAC |
| 901 | ATGAAATAAA GAATTTAAAG AATG |

GENBANK ID: X02162
DEFINITION HUMAN MRNA FOR AFOLIPOPROTEIN AI (APO AI)=.
VERSION X02162.1 GI:28771
CDS 87..890
/CODON_START=1

| | |
|---|---|
| 1 | GAATTCAAAA AAAAAAGAAA AAAAAAAAAA AAAAAAAAAA AAAAAAAGAG AGACTGCGAG |
| 61 | AAGGAGGTCC CCCACGGCCC TTCAGGATGA AAGCTGCGGT GCTGACCTTG GCCGTGCTCT |
| 121 | TCCTGACGGG GAGCCAGGCT CGGCATTTCT GGCAGCAAGA TGAACCCCCC CAGAGCCCCT |
| 181 | GGGATCGAGT GAAGGACCTG GCCACTGTGT ACGTGGATCT GCTCAAAGAC AGCGGCAGAG |
| 241 | ACTATGTGTC CCAGTTTGAA GGCTCCGCCT TGGGAAAACA GCTAAACCTA AAGCTCCTTG |
| 301 | ACAACTGCGA CAGCCTGACC TCCACCTTCA GCAAGCTGCG CGAACAGCTC GGCCCTGTGA |
| 361 | CCCAGGAGTT CTGGGATAAC CTGGAAAAGG AGACAGAGGG CCTGAGGCAG GAGATGAGCA |
| 421 | AGGATCTGGA GGAGGTGAAG GCCAAGGTGC AGCCCTACCT GGACGACTTC CAGAAGAAGT |
| 481 | GGCAGGAGGA GATGGAGCTC TACCGCCAGA AGGTGGAGCC GCTGCGCGCA GAGCTCCAAG |
| 541 | AGGGCGCGCG CCAGAAGCTG CACGAGCTGC AAGAGAAGCT GAGCCCACTG GGCGAGGAGA |
| 601 | TGCGCGACCG CGCGCGCGCC CATCTGGACG CGCTGCGCAC GCATCTGGCC CCCTACAGCG |
| 661 | ACGAGCTGCG CCAGCGCTTG GCCGCGCGCC TTGAGCCTCT CAAGGACAAC GGCGGCGCCA |
| 721 | GACTGGCCGA GTACCACGCC AAGGCCACCG AGCATCTGAG CACGCTCAGC GAGAAGGCCA |
| 781 | AGCCCGCGCT CGAGGACCTC CGCCAAGCCC TCCTGCCCGT GCTGGAGAGC TTCAAGGTCA |
| 841 | GCTTCCTGAG CGCTCTCGAC GACTACACTA AGAAGCTCAA CACCCAGTGA GCCGCCCGCC |
| 901 | GCCGCCCCCC TTCCCGGTGC TCAGAATAAA CGTTTCCAAA GTGGGAAAAA AAAAAAAAAG |
| 961 | AATTC |

GENBANK ID: XM_007441.1
DEFINITION HOMO SAPIENS PRESENILIN 1 (ALZHEIS2ER DISEASE 3) (PSEN1),
MRNA.
VERSION XM_007441.1 GI:11435041
CDS 249..1652
/CODON_START=1

| | |
|---|---|
| 1 | TGGGACAGGC AGCTCCGGGG TCCGCGGTTT CACATCGGAA ACAAAACAGC GGCTGGTCTG |
| 61 | GAAGGAACCT GAGCTACGAG CCGCGGCGGC AGCGGGGCGG CGGGGAAGCG TATACCTAAT |
| 121 | CTGGGAGCCT GCAAGTGACA ACAGCCTTTG CGGTCCTTAG ACAGGTTGGG CTGGAGGAGA |
| 181 | ACACATGAAA GAAAGAACCT CAAGAGGCTT TGTTTTCTGT GAAACAGTAT TTCTATACAG |
| 241 | TTGCTCCAAT GACAGAGTTA CCTGCACCGT TGTCCTACTT CCAGAATGCA CAGATGTCTG |
| 301 | AGGACAACCA CCTGAGCAAT ACTGTACGTA GCCAGAATGA CAATAGAGAA CGGCAGGAGC |
| 361 | ACAACGACAG ACGGAGCCTT GGCCACCCTG AGCCATTATC TAATGGACGA GCGCAGGGTA |
| 421 | ACTCCCGGCA GGTGGTGGAG CAAGATGAGG AAGAAGATGA GGAGCTGACA TTGAAATATG |
| 481 | GCGCCAAGCA TGTGATCATG CTCTTTGTCC CTGTGACTCT CTGCATGGTG GTGGTCGTGG |
| 541 | CTACCATTAA GTCAGTCAGC TTTTATACCC GGAAGGATGG GCAGCTAATC TATACCCCAT |
| 601 | TCACAGAAGA TACCGAGACT GTGGGCCAGA GAGCCCTGCA CTCAATTCTG AATGCTGCCA |
| 661 | TCATGATCAG TGTCATTGTT GTCATGACTA TCCTCCTGGT GGTTCTGTAT AAATACAGGT |
| 721 | GCTATAAGGT CATCCATGCC TGGCTTATTA TATCATCTCT ATTGTTGCTG TTCTTTTTTT |
| 781 | CATTCATTTA CTTGGGGGAA GTGTTTAAAA CCTATAACGT TGCTGTGGAC TACATTACTG |
| 841 | TTGCACTCCT GATCTGGAAT TTTGGTGTGG TGGGAATGAT TTCCATTCAC TGGAAAGGTC |
| 901 | CACTTCGACT CCAGCAGGCA TATCTCATTA TGATTAGTGC CCTCATGGCC CTGGTGTTTA |
| 961 | TCAAGTACCT CCCTGAATGG ACTGCGTGGC TCATCTTGGC TGTGATTTCA GTATATGATT |
| 1021 | TAGTGGCTGT TTTGTGTCCG AAAGGTCCAC TTCGTATGCT GGTTGAAACA GCTCAGGAGA |
| 1081 | GAAATGAAAC GCTTTTTCCA GCTCTCATTT ACTCCTCAAC AATGGTGTGG TTGGTGAATA |
| 1141 | TGGCAGAAGG AGACCCGGAA GCTCAAAGGA GAGTATCCAA AAATTCCAAG TATAATGCAG |
| 1201 | AAAGCACAGA AAGGGAGTCA CAAGACACTG TTGCAGAGAA TGATGATGGC GGGTTCAGTG |
| 1261 | AGGAATGGGA AGCCCAGAGG GACAGTCATC TAGGGCCTCA TCGCTCTACA CCTGAGTCAC |
| 1321 | GAGCTGCTGT CCAGGAACTT TCCAGCAGTA TCCTCGCTGG TGAAGACCCA GAGGAAAGGG |
| 1381 | GAGTAAAACT TGGATTGGGA GATTTCATTT TCTACAGTGT TCTGGTTGGT AAAGCCTCAG |
| 1441 | CAACAGCCAG TGGAGACTGG AACACAACCA TAGCCTGTTT CGTAGCCATA TTAATTGGTT |
| 1501 | TGTGCCTTAC ATTATTACTC CTTGCCATTT TCAAGAAAGC ATTGCCAGCT CTTCCAATCT |
| 1561 | CCATCACCTT TGGGCTTGTT TTCTACTTTG CCACAGATTA TCTTGTACAG CCTTTTATGG |
| 1621 | ACCAATTAGC ATTCCATCAA TTTTATATCT AGCATATTTG CGGTTAGAAT CCCATGGATG |
| 1681 | TTTCTTCTTT GACTATAACA AAATCTGGGG AGGACAAAGG TGATTTTCCT GTGTCCACAT |
| 1741 | CTAACAAAGT CAAGATTCCC GGCTGGACTT TTGCAGCTTC CTTCCAAGTC TTCCTGACCA |
| 1801 | CCTTGCACTA TTGGACTTTG GAAGGAGGTG CCTATAGAAA ACGATTTTGA ACATACTTCA |
| 1861 | TCGCAGTGGA CTGTGTCCCT CGGTGCAGAA ACTACCAGAT TTGAGGGACG AGGTCAAGGA |
| 1921 | GATATGATAG GCCCGGAAGT TGCTGTGCCC CATCAGCAGC TTGACGCGTG GTCACAGGAC |
| 1981 | GATTTCACTG ACACTGCGAA CTCTCAGGAC TACCGTTACC AAGAGGTTAG GTGAAGTGGT |
| 2041 | TTAAACCAAA CGGAACTCTT CATCTTAAAC TACACGTTGA AAATCAACCC AATAATTCTG |
| 2101 | TATTAACTGA ATTCTGAACT TTTCAGGAGG TACTGTGAGC AAGAGCAGGC ACCAGCAGCA |
| 2161 | GAATGGGGAA TCGACAGGTG GGCAGCGGTT CCAGCTTCCC TTTGATTTTT TGCTGCAGAC |
| 2221 | TCATCCTTTT TAAATGAGAC TTGTTTTCCC CTCTCTTTGA GTCAAGTCAA ATATGTAGAT |
| 2281 | TGCCTTTGGC AATTCTTCTT CTCAAGCACT GACACTCATT ACCGTCTGTG ATTGCCATTT |
| 2341 | CTTCCCAAGG CCAGTCTGAA CCTGAGGTTG CTTTATCCTA AAAGTTTTAA CCTCAGGTTC |
| 2401 | CAAATTCAGT AAATTTTGGA AACAGTACAG CTATTTCTCA TCAATTCTCT ATCATGTTGA |
| 2461 | AGTCAAATTT GGATTTTCCA CCAAATTCTG AATTTCTAGA CATACTTGTA CGCTCACTTG |
| 2521 | CCCCAGATGC CTCCTCTGTC CTCATTCTTC TCTCCCACAC AAGCAGTCTT TTTCTACAGC |
| 2581 | CAGTAAGGCA GCTCTGTCGT GGTAGCAGAT GGTCCCATTA TTCTAGGGTC TTACTCTTTG |
| 2641 | TATGATGAAA AGAATGTGTT ATGAATCGGT GCTGTCAGCC CTGCTGTCAG ACCTTCTTCC |
| 2701 | ACAGCAAATG AGATGTATGC CCAAAGACGG TAGAATTAAA GAAGAGTAAA ATGGCTGTTG |
| 2761 | AAGC |

GENBANK ID: XM_087242.1
DEFINITION HOMO SAPIENS ARGINYL AMINOPEPTIDASE (AMINOPEPTIDASE B) -LIKE
1(RNPEPL1), MRNA.
VERSION XM_087242.1 GI:18600482
CDS 700..1764
/CODON_START=1

| | |
|---|---|
| 1 | GTGGACCCGT TCACCGACTA CGGCTCCTCC CTCACCGTCA CGCTGCCGCC CGAGCTGCAG |
| 61 | GCGCACCAGC CCTTCCAGGT CATCCTGCGG TACACCTCGA CCGACGCCCC CGCCATCTGG |
| 121 | TGGCTGGACC CAGAGCTGAC CTATGGCTGC GCCAAGCCCT TCGTCTTCAC CCAGGGCCAC |
| 181 | TCCGTGTGCA ACCGCTCCTT CTTCCCGTGC TTCGACACAC CTGCCGTGAA GTGCACCTAC |
| 241 | TCTGCCGTCG TCAAGGCGCC ATCGGGGGTG CAGGTGCTGA TGAGTGCCAC CCGGAGTGCA |
| 301 | TACATGGAGG AAGAAGGCGT CTTCCACTTC CACATGGAGC ACCCCGTGCC CGCCTACCTC |
| 361 | GTGGCCCTGG TGGCCGGAGA CCTCAAGCCG GCAGACATCG GGCCCAGGAG CCGCGTGTGG |
| 421 | GCCGAGCCAT GCCTCCTGCC CACGGCCACC AGCAAGCTGT CGGGCGCAGT GGAGCAGTGG |
| 481 | CTGAGTGCAG CTGAGCGGCT GTATGGGCCC TACATGTGGG GCAGGTACGA CATTGTCTTC |
| 541 | CTGCCACCCT CCTTCCCCAT CGTGGCCATG GAGAACCCCT GCCTCACCTT CATCATCTCC |
| 601 | TCCATCCTGG AGAGCGATGA GTTCCTGGTC ATCGATGTCA TCCACGAGGT GGCCCACAGT |
| 661 | TGGTTCGGCA ACGCTGTCAC CAACGCCACG TGGGAAGAGA TGTGGCTGAG CGAGGGCCTG |
| 721 | GCCACCTATG CCCAGCGCCG TATCACCACC GAGACCTACG GTGCTGCCTT CACCTGCCTG |
| 781 | GAGACTGCCT TCCGCCTGGA CGCCCTGCAC CGGCAGATGA AGCTTCTGGG AGAGGACAGG |
| 841 | CCGGTCAGCA AACTGCAGGT CAAGCTGGAG CCAGGAGTGA ATCCCAGCCA CCTGATGAAC |
| 901 | CTGTTCACCT ACGAGAAGGG CTACTGCTTC GTGTACTACC TGTCCCAGCT CTGCGGAGAC |
| 961 | CCACAGCGCT TTGATGACTT TCTCCGAGCC TATGTGGAGA AGTACAAGTT CACCAGCGTG |
| 1021 | GTGGCCCAGG ACCTGCTGGA CTCCTTCCTG AGCTTCTTCC CGGAGCTGAA GGAGCAGAGC |
| 1081 | GTGGACTGCC GGGCAGGGCT GGAATTCGAG CGCTGGCTCA ATGCCACAGG CCCGCCGCTG |
| 1141 | GCTGAGCCGG ACCTGTCTCA GGGATCCAGC CTGACCCGGC CCGTGGAGGC CCTTTTCCAG |
| 1201 | CTGTGGACCG CAGAACCTCT GGACCAGGCA GCTGCCTCGG CCAGCGCCAT TGACATCTCC |
| 1261 | AAGTGGAGGA CCTTCCAGAC AGCACTCTTC CTGGACCGGC TCCTGGATGG GTCCCCGCTG |
| 1321 | CCGCAGGAGG TGGTGATGAG CCTGTCCAAG TGCTACTCCT CCCTGCTGGA CTCGATGAAC |
| 1381 | GCTGAGATCC GCATCCGCTG GCTGCAGATT GAGGTCCGCA ACGACTACTA TCCTGACCTC |
| 1441 | CACAGGGTGC GGCGCTTCCT GGAGAGCCAG ATGTCACGCA TGTACACCAT CCCGCTGTAC |
| 1501 | GAGGACCTCT GCACCGGTGC CCTCAAGTCC TTCGCGCTGG AGGTCTTCTA CCAGACGCAG |
| 1561 | GGCCGGCTGC ACCCCAACCT GCGCAGAGCC ATCCAGCAGA TCCTGTCCCA GGGCCTGGGC |
| 1621 | TCCAGCACAG AGCCCGCCTC AGAGCCCAGC ACGGAGCTGG GCAAGGCTGA AGCAGACACA |
| 1681 | GACTCGGACG CACAGGCCCT GCTGCTTGGG GACGAGGCCC CCAGCAGTGC CATCTCTCTC |
| 1741 | AGGGACGTCA ATGTGTCTGC CTAGCCCTGT TGGCGGGCTG ACCCTCGACC TCCCAGACAC |
| 1801 | CACAATTGTG CCTTCTGTGG GCCAGGCCTG CCATGACTGC GTCTCGGCTC TGGCCATGAG |
| 1861 | CTCTGCCCAG GCCCACAAGC CCCTCCCCTG GGCTCTCCCA GGCAGGGAGA ATGGGGAGAG |
| 1921 | GGACCTCCTT GTGTCTGGCA GAGACCTGTG GACCTGGCCT CCCCACTCCC AGCTCTCTTG |
| 1981 | CACTGCAGGC CCTGGGGCCA GCCCGCACAC ACCATGCCTC CTGTCTCAAC ACTGACAGCT |
| 2041 | GTGCCTAGCC CCGGATGCCA GCACCTGCCA GGTGCCGCCC CGGGGCAAGG GCCCCAGCAG |
| 2101 | CCCTATGGTG ACCGCCACAC TGTGCCTTAA TGTCTGCCGG GGGCCCAGGC TGTGCTGTCC |
| 2161 | CTGCAGCACG CCTCCTTGCA GGGATCTGAG CCACCCTCCC CGCACAGCCC TGCACCCCGC |
| 2221 | CCCTAGGGTT GGCAGCCTCA GTTGGCCCCT GGCAGAGGAA CAAGGACACA GACATTCCCT |
| 2281 | CAGTGTGGGG GGCAGGGGAC ACAGGGAGAG GATGGTTGTC CCTGGGGAGG GCCCTCTGGC |
| 2341 | CCCAGGCAAC CTTAGCCCCT CAGAACAGGG AGTCCCAGGA CCCAGGGAGA GTGTGGGGAC |
| 2401 | AGGACAGCCT GTCTCTTGTA GCTTCCTGGG GTGGGAGGCA CAGGGGCAAA GCAATACCCC |
| 2461 | AGGGAAAGTG GGAGGTGGTG CTGGTGCTCT CTCCAGGCCC ACCATGCTGG GAGAGGCGGC |
| 2521 | CAGAGCCTGG GGCCTCCAGC CTGGGACTGC TGTGATGGGG TATCACGGTG ATGGTCCCAT |
| 2581 | TAAACTTCCA CTCTGCAAAC CTG |

GENBANK ID: S90469
DEFINITION CYTOCHROME P450 REDUCTASE [HUMAN, PLACENTA, MRNA PARTIAL, 2403
NT].
VERSION S90469.1 GI:247306
CDS 1..2031
CODO_START=1

| | |
|---|---|
| 1 | GGAGACTCCC ACGTGGACAC CAGCTCCACC GTGTCCGAGG CGGTCGCCGA AGAAGTATCT |
| 61 | CTTTTCAGCA TGACGCACAT GATTCTGTTT TCGCTCATCG TGGGTCTCCT AACCTACTGG |
| 121 | TTCCTCTTCA GAAAGAAAAA AGAAGAAGTC CCCGACTTCA CCAAAATTCA GACATTGACC |
| 181 | TCCTCTGTCA GAGAGAGGAG CTTTGTGGAA AAGATGAAGA AAACGGGGAG GAACATCATC |
| 241 | GTGTTCTACG GCTCCCAGAC GGGGACTGCA GAGGAGTTTG CCAACCGCCT GTCCAAGGAC |
| 301 | GCCCACCGCT ACGGGATGCG AGGCATGTCA GCGGACCCTG AGGAGTATGA GCTGCCGGAC |
| 361 | CTGAGCAGCC TGCCAGAGAT CGACAACGCC CTGGTGGTTT TCTGCATGGC CACGTACGCT |
| 421 | GAGGGAGACC CCACCGACAA TGCCCAGGAC TTCTACGACT GGCTGCAGGA GACAGACGTG |
| 481 | GATCTCTCTG GGGTCAAGTT CGCGGTGTTT GGTCTTGGGA ACAAGACCTA CGAGCACTTC |
| 541 | AATGCCATGG GCAAGTACGT GGACAAGCGG CTGGAGCAGC TCGGCGCCCA GCGCATCTTT |
| 601 | GAGCTGGGGT TGGGCGACGA CGATGGGAAC TTGGAGGAGG ACTTCATCAC CTGGCGAGAG |
| 661 | CAGTTCTGGC CGGCCGTGTG TGAACACTTT GGGGTGGAAG CCACTGGCGA GGAGTCCAGC |
| 721 | ATTCGCCAGT ACGAGCTTGT GGTCCACACC GACATAGATG CGGCCAAGGT GTACATGGGG |
| 781 | GAGATGGGCC GGCTGAAGAG CTACGAGAAC CAGAAGCCCC CCTTTGATGC CAAGAATCCG |
| 841 | TTCCTGGCTG CAGTCACCAC CAACCGGAAG CTGAACCAGG GAACCGAGCG CCACCTCATG |
| 901 | CACCTGGAAT TGGACATCTC GGACTCCAAA ATCAGGTATG AATCTGGGGA CCACGTGGCT |
| 961 | GTGTACCCAG CCAACGACTC TGCTCTCGTC AACCAGCTGG GCAAAATCCT GGGTGCCGAC |
| 1021 | CTGGACGTCG TCATGTCCCT GAACAACCTG GATGAGGAGT CCAACAAGAA GCACCCATTC |
| 1081 | CCGTGCCCTA CGTCCTACCG CACGGCCCTC ACCTACTACC TGGACATGAC CAACCCGCCG |
| 1141 | CGTACCAACG TGCTGTACGA GCTGGCGCAG TACGCCTCGG ACCGCTGGGA GCAGGAGCTG |
| 1201 | CTGCGCAAGA TGGCCTCCTC CTCCGGCGAG GGCAAGGAGC TGTACCTGAG CTGGGTGGTG |
| 1261 | GAGGGCGGGA GGCACATCCT GGCCATCCTG CAGGACTGCC CGTCCCTGCG GCCCCCCATC |
| 1321 | GACCACCTGT GTGAGCTGCT GCCGCGCCTG CAGGCCCGCT ACTACTCCAT CGCCTCATCC |
| 1381 | TCCAAGGTCC ACCCCAACTC TGTGCACATC TGTGCGGTGG TTGTGGAGTA CGAGACCAAG |
| 1441 | GCCGGCCGCA TCAACAAGGG CGTGGCCACC AACTGGCTGC GGGCCAAGGA GCCTGTCGGG |
| 1501 | GAGAACGGCG GCCGTGCGCT GGTGCCCATG TTCGTGCGCA AGTCCCAGTT ACGCCTGCCC |
| 1561 | TTCAAGGCCA CCACGCCTGT CATCATGGTG GGCCCCGGCA CCGGGTGGCA CCCTTTCATA |
| 1621 | GGCTTCATCC AGGAGCGGGC CTGGCTGCGA CAGCAGGGCA AGGAGGTGGG GGAGACGCTG |
| 1681 | CTGTACTACG GCTGCCGCCG CTCGGATGAG GACTACCTGT ACGGGGAGGA GCTGGCGCAG |
| 1741 | TTCCACAGGG ACGGTGCGCT CACCCAGCTC AACGTGGCCT TCTCCCGGGA GCAGTCCCAC |
| 1801 | AAGGTCTACG TCCAGCACCT GCTAAAGCAA GACCGAGAGC ACCTGTGGAA GTTGATCGAA |
| 1861 | GGCGGTGCCC ACATCTACGT CTGTGGGGAT GCACGGAACA TGGCCAGGGA TGTGCAGAAC |
| 1921 | ACCTTCTACG ACATCGTGGC TGAGCTCGGG GCCATGGAGC ACGCGCAGGC GGTGGACTAC |
| 1981 | ATCAAGAAAC TGATGACCAA GGGCCGCTAC TCCCTGGACG TGTGGAGCTA GGGGCCTGCC |
| 2041 | TGCCCCACCC ACCGCACAGA CTCCGGCCTG TAATCAGCTC TCCTGGCTCC CTCCCGTAGT |
| 2101 | CTCCTGGGTG TGTTTGGCTT GGCCTTGGCA TGGGCGCAGG CCCAGTGACA AAGACTCCTC |
| 2161 | TGGGCCTGGG GTGCATCCTC CTCAGCCCCC AGGCCAGGTG AGGTCCACCG GCCCCTGGCA |
| 2221 | GCACAGCCCA GGGCCTGCAT GGGGGCACCG GGCTCCATGC CTCTGGAGCC TCTGGCCCTC |
| 2281 | GGTGGCTGCA CAGAAGGGCT CTTTCTCTCT GCTGAGCTGG CCCAGCCCCT CCACGTGATT |
| 2341 | TCCAGTGAGT GTAAATAATT TTAAATAACC TCTGGCCCTT GGAATAAAGT TCTGTTTTCT |
| 2401 | GTA |

GENBANK ID: NM_006254.1
DEFINITION HOMO SAPIENS PROTEIN KINASE C, DELTA (PRKCD), MRNA.
VERSION NM_006254.1 GI:5453969
CDS 59..2089
/CODON_START=1

| | |
|---|---|
| 1 | TGCCGCCGCG ACCCTTGGCG CCTGCCCCTG CAACGGGAGC CCCACTGCAG GCCCCACCAT |
| 61 | GGCGCCGTTC CTGCGCATCG CCTTCAACTC CTATGAGCTG GGCTCCCTGC AGGCCGAGGA |
| 121 | CGAGGCGAAC CAGCCCTTCT GTGCCGTGAA GATGAAGGAG GCGCTCAGCA CAGAGCGTGG |
| 181 | GAAAACACTG GTGCAGAAGA AGCCGACCAT GTATCCTGAG TGGAAGTCGA CGTTCGATGC |
| 241 | CCACATCTAT GAGGGGCGCG TCATCCAGAT TGTGCTAATG CGGGCAGCAG AGGAGCCAGT |
| 301 | GTCTGAGGTG ACCGTGGGTG TGTCGGTGCT GGCCGAGCGC TGCAAGAAGA ACAATGGCAA |
| 361 | GGCTGAGTTC TGGCTGGACC TGCAGCCTCA GGCCAAGGTG TTGATGTCTG TTCAGTATTT |
| 421 | CCTGGAGGAC GTGGATTGCA AACAATCTAT GCGCAGTGAG GACGAGGCCA AGTTCCCAAC |
| 481 | GATGAACCGC CGCGGAGCCA TCAAACAGGC CAAAATCCAC TACATCAAGA ACCATGAGTT |
| 541 | TATCGCCACC TTCTTTGGGC AACCCACCTT CTGTTCTGTG TGCAAAGACT TTGTCTGGGG |
| 601 | CCTCAACAAG CAAGGCTACA AATGCAGGCA ATGTAACGCT GCCATCCACA AGAAATGCAT |
| 661 | CGACAAGATC ATCCGCAGAT CCACTGGCAC CGCCGCCAAC AGGCGGGACA CTATATTCCA |
| 721 | GAAAGAACGC TTCAACATCC ACATGCCGCA CCGCTTCAAG GTTCACAACT ACATGAGCCC |
| 781 | CACCTTCTGT GACCACTGCG GCAGCCTGCT CTGGGGACTG GTGAAGCAGG GATTAAAGTG |
| 841 | TGAAGACTGC GGCATGAATG TGCACCATAA ATGCCGGGAG AAGGTGGCCA ACCTCTGCGG |
| 901 | CATCAACCAG AAGCTTTTGG CTGAGGCCTT GAACCAAGTC ACGCAGAGAG CCTCCCGGAG |
| 961 | ATCAGACTCA GCCTCCTCAG AGCCTGTTGG GATATATCAG GGTTTCGAGA AGAAGACCGG |
| 1021 | AGTTGCTGGG GAGGACATGC AAGACAACAG TGGGACCTAC GGCAAGATCT GGGAGGGCAG |
| 1081 | CAGCAAGTGC AACATCAACA ACTTCATCTT CCACAAGGTC CTGGGCAAAG GCAGCTTCGG |
| 1141 | GAAGGTGCTG CTTGGAGAGC TGAAGGGCAG AGGAGACTAC TCTGCCATCA AGGCCCTCAA |
| 1201 | GAAGGATGTG GTCCTGATCG ACGACGACGT GGAGTGCACC ATGGTTGAGA AGCGGGTGCT |
| 1261 | GACACTTGCC GCAGAGAATC CCTTTCTCAC CCACCTCATC TGCACCTTCC AGACCAAGGA |
| 1321 | CCACCTGTTC TTTGTGATGG AGTTCCTCAA CGGGGGGGAC CTGATGTACC ACATCCAGGA |
| 1381 | CAAAGGCCGC TTTGAACTCT ACCGTGCCAC GTTTTATGCC GCTGAGATAA TGTGTGGACT |
| 1441 | GCAGTTTCTA CACAGCAAGG GCATCATTTA CAGGGACCTC AAACTGGACA ATGTGCTGTT |
| 1501 | GGACCGGGAT GGCCACATCA AGATTGCCGA CTTTGGGATG TGCAAAGAGA ACATATTCGG |
| 1561 | GGAGAGCCGG GCCAGCACCT TCTGCGGCAC CCCTGACTAT ATCGCCCCTG AGATCCTACA |
| 1621 | GGGCCTGAAG TACACATTCT CTGTGGACTG GTGGTCTTTC GGGGTCCTTC TGTACGAGAT |
| 1681 | GCTCATTGGC CAGTCCCCCT TCCATGGTGA TGATGAGGAT GAACTCTTCG AGTCCATCCG |
| 1741 | TGTGGACACG CCACATTATC CCCGCTGGAT CACCAAGGAG TCCAAGGACA TCCTGGAGAA |
| 1801 | GCTCTTTGAA AGGGAACCAA CCAAGAGGCT GGGAATGACG GGAAACATCA AAATCCACCC |
| 1861 | CTTCTTCAAG ACCATAAACT GGACTCTGCT GGAAAAGCGG AGGTTGGAGC CACCCTTCAG |
| 1921 | GCCCAAAGTG AAGTCACCCA GAGACTACAG TAACTTTGAC CAGGAGTTCC TGAACGAGAA |
| 1981 | GGCGCGCCTC TCCTACAGCG ACAAGAACCT CATCGACTCC ATGGACCAGT CTGCATTCGC |
| 2041 | TGGCTTCTCC TTTGTGAACC CCAAATTCGA GCACCTCCTG GAAGATTGAG GTTCCTGGAC |
| 2101 | AGAT |

GENBANK ID: X61971.1
DEFINITION H. SAPIENS MRNA FOR MACROPAIN SUBUNIT DELTA.
VERSION X61971.1 GI:296733
CDS <1..543
/CODON_START=1

| | |
|---|---|
| 1 | ATCGCCAATC GAGTGACTGA CAAGCTGACA CCTATTCACG ACCGCATTTT CTGCTGTCGC |
| 61 | TCAGGCTCAG CTGCTGATAC CCAGGCAGTA GCTGATGCTG TCACCTACCA GCTCGGTTTC |
| 121 | CACAGCATTG AACTGAATGA GCCTCCACTG GTCCACACAG CAGCCAGCCT CTTTAAGGAG |
| 181 | ATGTGTTACC GATACCGGGA AGACCTGATG GCGGGAATCA TCATCGCAGG CTGGGACCCT |
| 241 | CAAGAAGGAG GGCAGGTCTA CTCAGTGCCT ATGGGGGGTA TGATGGTAAG GCAGTCCTTT |
| 301 | GCCATTGGAG GCTCCGGGAG CTCCTACATC TATGGCTATG TTGATGCTAC CTACCGGGAA |
| 361 | GGCATGACCA AGGAAGAGTG TCTGCAATTC ACGGCCAATG CTCTCGCTTT GGCCATGGAG |
| 421 | CGGGATGGCT CCAGTGGAGG AGTGATCCGC CTGGCAGCCA TTGCAGAGTC AGGGGTAGAG |
| 481 | CGGCAAGTAC TTTTGGGAGA CCAGATACCC AAATTCGCCG TTGCCACTTT ACCACCCGCC |
| 541 | TGAATCCTGG GATTCTAGTA TGCAATAAGA GATGCCCTGT ACTGATGCAA AATTTAATAA |
| 601 | AGTTTGTCAC AGAGAAAAAA AAAA |

GENBANK ID: AH005909.1
GENBANK ID: XM_088424.1
DEFINITION HOMO SAPIENS RETINOID X RECEPTOR, ALPHA (RXRA), MRNA.
VERSION XM_088424.1 GI:18571706
CDS 519..1016
/CODON_START=1

| | |
|---|---|
| 1 | AAGCAGAACC TGGCCTCCCT GGCCACAGCA GCCTTACCCA CCGCTCTACG TGTCCCGGGC |
| 61 | ACTTCCCGCA GCCTTCCCGT CCCTTTCTCA TCGGCCTTGT AGTTGTACAG TGCTGTTGGT |
| 121 | TTGAAAAGGT GATGTGTGGG GAGTGCGGCT CATCACTGAG TAGAGAGGTA GAATTTCTAT |
| 181 | TTAACCAGAC CTGTAGTAGT ATTACCAATC CAGTTCAATT AAGGTGATTT TTTGTAATTA |
| 241 | TTATTATTTT GGTGGGACAA TCTTTAATTT TCTAAAGATA GCACTAACAT CAGCTCATTA |
| 301 | GCCACCTGTG CCTGTCCCCG CCTTGGCCCG GCTGGATGAA GCGGCTTCCC CGCAGGGCCC |
| 361 | CCACTTCCCA GTGGCTGCTT CCTGGGGACC CAGGGCACCC CGGCACCTTC AGGCACGCTC |
| 421 | CTCAGCTGGT CACCTCCCGG CTTTGCCGTT CAGATGGGGC TCCTGAGGCT CAGGAGTGAA |
| 481 | GATGCCACAG AGCCGGGCTC CCCTAGGCTG CGTCGGGCAT GCTTGGAAGC TGGCCTGCCA |
| 541 | GGACCTTCCA CCCTGGGGCC TGTGTCAGCC GCCGGCCCTC CGCACCCTGG AAGCACACGG |
| 601 | CCTCTGGGAA GGACAGCCCT GACCTTCGGT TTTCCGAGCA CGGTGTTTCC CAAGAATTCT |
| 661 | GGGCTTGCCG CCTGGTGGCA GTGCTGGAGA TGACCCCGAG CCCCTCCCCG TGGGGCACCC |
| 721 | AGGAGGGCCC TGCCGAAATG TGCAGCCTGT GGGTAGTCGG CTGGTGTCCC TGTCGTGGAG |
| 781 | CTGGGGTGCG TGATCTGGTG CTCGTCCACG CAGGTGTGTG GTGTAAACAT GTATGTGCTG |
| 841 | TACAGACAGA CGCGTGTGGA GAGAGCCGCA CACCAGCGCC ACCCAGGAAA GGCGGAGCGG |
| 901 | TTACCAGTGT TTTGTGTTTA TTTTTAATCA AGACGTTTCC CCTGTTTTCC TATAAATTTG |
| 961 | CTTCGTGTAA GCAAGTACAT AAGGACCCTC CTTTGGTGAA ATCCGGGTTC GAATGAATAT |
| 1021 | CTCAAGGCAG GAGATGCATC TATTTTAAGA TGCTTTGGAG CAGACAGCTT TAGCCGTTCC |
| 1081 | CAATCCTTAG CAATGCCTTA GCTGGGACGC ATAGCTAATA CTTTAGAGAG GATGACAGAT |
| 1141 | CCATAAAGAG AGTAAAGATA AGAGAAAATG TCTAAAGCAT CTGGAAAGGT AAAAAAAAAA |
| 1201 | AATCTATTTT TGTACAAATG TAATTTTATC CCTCATGTAT ACTTGGATAT GGCGGGGGGA |
| 1261 | GGGGTCGGAC TGTTTCGTTT CTGCTTCTAG AGATTGAGGT GAAAGCTTCG TCCGAGAAAC |
| 1321 | GCCAGGACAG ACGATGGCAG AGGAGAGGGC TCCTGTGACG GGGGCCAGGG TTGGGAGGAA |
| 1381 | ACCGCCGCAA TGGGGGTGTC TTCCCTCGGG GGAGGAGGGT GGGCCTGAGG CTTTCAAGGG |
| 1441 | TTTTCTTCCC TTTCGAGTAA TTTTTAAAGC CTTGCTCTGT TGTGTCCTGT TGCCGGCTCT |
| 1501 | GGCCTTCCTG TGACTGACTG TGAAGTGGCT TCTCCGTACG ATTGTCTCTG AAACATCGTG |
| 1561 | GCCGCAGGTG CCAGGGTTTG ATGGACAGTA GCATTAGAAT TGTGGAAAAG GAACACGCAA |
| 1621 | AGGGAGAAGT GTGAGAGGAG AAACAAAATA TGAGCGTTTA AAATACATCG CCATTCAG |

GENBANK ID: U41745.1
DEFINITION HUMAN PDGF ASSOCIATED PROTEIN MRNA, COMPLETE CDS.
VERSION U41745.1 GI:1136583
CDS 22..567
/CODON_START=1

| | |
|---|---|
| 1 | GAATTCCGCG GCGGCGCCTC AATGCCTAAA GGAGGAAGAA AGGGAGGCCA CAAAGGCCGG |
| 61 | GCGAGGCAGT ATACAAGCCC TGAGGAGATC GACGCGCAGC TGCAGGCTGA GAAGCAGAAG |
| 121 | GCCAGGGAAG AAGAGGAGCA AAAAGAAGGT GGAGATGGGG CTGCAGGTGA CCCCAAAAAG |
| 181 | GAGAAGAAAT CTCTAGACTC AGATGAGAGT GAGGATGAAG AAGATGACTA CCAGCAAAAG |
| 241 | CGCAAAGGCG TTGAAGGGCT CATCGACATC GAGAACCCCA ACCGGGTGGC ACAGACAACC |
| 301 | AAAAAGGTCA CACAACTGGA TCTGGACGGG CCAAAGGAGC TTTCGAGGAG AGAACGAGAA |
| 361 | GAGATTGAGA AGCAGAAGGC AAAAGAGCGT TACATGAAAA TGCACTTGGC CGGGAAGACA |
| 421 | GAGCAAGCCA AGGCTGACCT GGCCCGGCTG GCCATCATCC GGAAACAGCG GGAGGAGGCT |
| 481 | GCCCGGAAGA AGGAAGAGGA AAGGAAAGCA AAAGACGATG CCACATTGTC AGGAAAACGA |
| 541 | ATGCAGTCAC TCTCCCTGAA TAAGTAACTG CGACCCGTGG GAGGAGATGC CGGGGACCTG |
| 601 | GGCCGCGCTG CCAGGACCTC TGCTGTGTCT CGCCCACCCT GTGCCCTGGC GCCGCTGCAA |
| 661 | CAGCCCCTCA TGGCCAGGAG CCCCCCATGC CTGGGCCTCC TCTTCATCTT GGCACAGAAA |
| 721 | TTGTTTGGGG GATGGGGGGG GGACTGGGGG AGGGGTAGCT GCTATCTTTG AGACAGAAAG |
| 781 | ATGCAGGACA GCATTTCATA TGTAACCATT TGAATGTTTT TGCTGTTTTT AGAATTC |

GENBANK ID: AH002617.1
GENBANK ID: XM_034862.1
DEFINITION HOMO SAPIENS INTERFERON REGULATORY FACTOR 1 (IRF1), MRNA.
VERSION XM_034862.1 GI:14726087
CDS 197..1174
/CODON_START=1

| | |
|---|---|
| 1 | CGAGCCCCGC CGAACCGAGG CCACCCGGAG CCGTGCCCAG TCCACGCCGG CCGTGCCCGG |
| 61 | CGGCCTTAAG AACCCGGCAA CCTCTGCCTT CTTCCCTCTT CCACTCGGAG TCGCGCTCCG |
| 121 | CGCGCCCTCA CTGCAGCCCC TGCGTCGCCG GGACCCTCGC GCGCGACCGC CGAATCGCTC |
| 181 | CTGCAGCAGA GCCAACATGC CCATCACTCG GATGCGCATG AGACCCTGGC TAGAGATGCA |
| 241 | GATTAATTCC AACCAAATCC CGGGGCTCAT CTGGATTAAT AAAGAGGAGA TGATCTTCCA |
| 301 | GATCCCATGG AAGCATGCTG CCAAGCATGG CTGGGACATC AACAAGGATG CCTGTTTGTT |
| 361 | CCGGAGCTGG GCCATTCACA CAGGCCGATA CAAAGCAGGG GAAAAGGAGC CAGATCCCAA |
| 421 | GACGTGGAAG GCCAACTTTC GCTGTGCCAT GAACTCCCTG CCAGATATCG AGGAGGTGAA |
| 481 | AGACCAGAGC AGGAACAAGG GCAGCTCAGC TGTGCGAGTG TACCGGATGC TTCCACCTCT |
| 541 | CACCAAGAAC CAGAGAAAAG AAAGAAAGTC GAAGTCCAGC CGAGATGCTA AGAGCAAGGC |
| 601 | CAAGAGGAAG TCATGTGGGG ATTCCAGCCC TGATACCTTC TCTGATGGAC TCAGCAGCTC |
| 661 | CACTCTGCCT GATGACCACA GCAGCTACAC AGTTCCAGGC TACATGCAGG ACTTGGAGGT |
| 721 | GGAGCAGGCC CTGACTCCAG CACTGTCGCC ATGTGCTGTC AGCAGCACTC TCCCCGACTG |
| 781 | GCACATCCCA GTGGAAGTTG TGCCGGACAG CACCAGTGAT CTGTACAACT TCCAGGTGTC |
| 841 | ACCCATGCCC TCCACCTCTG AAGCTACAAC AGATGAGGAT GAGGAAGGGA AATTACCTGA |
| 901 | GGACATCATG AAGCTCTTGG AGCAGTCGGA GTGGCAGCCA ACAAACGTGG ATGGGAAGGG |
| 961 | GTACCTACTC AATGAACCTG GAGTCCAGCC CACCTCTGTC TATGGAGACT TTAGCTGTAA |
| 1021 | GGAGGAGCCA GAAATTGACA GCCCAGGGGG GGATATTGGG CTGAGTCTAC AGCGTGTCTT |
| 1081 | CACAGATCTG AAGAACATGG ATGCCACCTG GCTGGACAGC CTGCTGACCC CAGTCCGGTT |
| 1141 | GCCCTCCATC CAGGCCATTC CCTGTGCACC GTAGCAGGGC CCCTGGGCCC CTCTTATTCC |
| 1201 | TCTAGGCAAG CAGCACCTGG CATCATGGTG GATATCGTGC ACAGAAGCTG GACTTCTCTG |
| 1261 | GGCCCCTCAA CAGCCAAGTG TGACCCCACT CCCAAGTGGG GATGGGGCCT CCCTCCTTGG |
| 1321 | GTCATTGACC TCTCAGGGCC TGGCAGGCCA GTGTCTGCGT TTTTCTTGTC GTCTAAAGCT |
| 1381 | GGCCCTGCCT CCTGGCAAGA TGAGGTTCTG AGACCAGTGT ATCAGGTCAG GCACTTGGAC |
| 1441 | AGGAGTCAGT GTCTGGCTTT TTCCTCTGAG CCCAGCTGCC TGGAGAGGGT CTCGCTGTCA |
| 1501 | CTGGGTGGCT CCTAGGGGAA CAGACCAGTG ACCCCAGAAA AGCATAACAC CAATCCCAGG |
| 1561 | GCTGGCTCTG CACTAAGAGA AAATTGCACT AAATCAATCT CGTTCCCAAA GAACTACCCC |
| 1621 | CTTTTCAGCT CAGCCCTGGG GACTGTTCCA AAGCCAGTGA AATGTGAAGG AAAGTGCGGT |
| 1681 | CCTTCGGGGC GATGCTGGCT CAGCCTCAGA GGAGCTCTAC CCTGCTCCCT GCTTTGGCTG |
| 1741 | AGGGGCTTGG GAAAAAAACT TGGCACTTTT TCGTGTGGAT CTTGCCACAT TTCTGATCAG |
| 1801 | AGGTGTACAC TAACATTTCC CCCGAGCTCT TGGCCTTTCC ATTTATTTAT ACAGTGCCTT |
| 1861 | GCTCGGCGCC CACCACCCCC TCAAGCCCCA GCAGCCCTCA ACAGGGCCAG GGAGGGAAGT |
| 1921 | GTGAGCGCCT TGGTATGACT TAAAATTGGA AATGTCATCT AACCATTAAG TCATGTGTGA |
| 1981 | ACACATAGGA CGTGTGTATA TATGTACATT TGTCTTTTTA TAAAAAGTAA ATTGTT |

GENBANK ID: AJ310549.1
DEFINITION HOMO SAPIENS MRNA FOR CLP-36 PROTEIN.
VERSION AJ310549.1 GI:13160404
CDS 1..990
/CODON_START=1

| | |
|---|---|
| 1 | ATGACCACCC ACCAGATAGA CCTCCAGGGC CCGGGGCCGT GGGGCTTCCG CCTCGTGGGC |
| 61 | GGCAAGGACT TCGAGCAGCC TCTCGCCATT TCCCGGGTCA CTCCTGGAAG CAAGGCGGCT |
| 121 | CTAGCTAATT TATGTATTGG AGATGTAATC ACAGCCATTG ATGGGGAAAA TACTAGCAAT |
| 181 | ATGACACACT TGGAAGCTCA GAACAGAATC AAAGGCTGCA CAGACAACTT GACTCTCACT |
| 241 | GTAGCCAGAT CTGAACATAA ACTGTGGTCT CCTCTGGTGA CGGAGGAAGG GAAGCGTCAT |
| 301 | CCATACAAGA TGAATTTAGC CTCTGAACCC CAGGAGGTCC TGCACATAGG AAGCGCCCAC |
| 361 | AACCGAAGTG CCATGCCCTT TACCGCCTCG CCTGCCTCCA GCACTACTGC CAGGGTCATC |
| 421 | ACAAACCAGT ACAACAACCC AGCTGGCCTC TACTCTTCTG AAAATATCTC CAACTTCAAC |
| 481 | AATGCCCTGG AGTCAAAGAC TGCTGCCAGC GGGGTGGAGG CGAACAGCAG ACCCTTAGAC |
| 541 | CATGCTCAGC CTCCAAGCAG CCTTGTCATC GACAAAGAAT CTGAAGTTTA CAAGATGCTT |
| 601 | CAGGAGAAAC AGGAGTTGAA TGAGCCCCCG AAACAGTCCA CGTCTTTCTT GGTTTTGCAG |
| 661 | GAAATCCTGG AGTCTGAAGA AAAAGGGGAT CCCAACAAGC CCTCAGGATT CAGAAGTGTT |
| 721 | AAAGCTCCTG TCACTAAAGT GGCTGCGTCG ATTGGAAATG CTCAGAAGTT GCCTATGTGT |
| 781 | GACAAATGTG GCACTGGGAT TGTTGGTGTG TTTGTGAAGC TGCGGGACCG TCACCGCCAC |
| 841 | CCTGAGTGTT ATGTGTGCAC TGACTGTGGC ACCAACCTGA AACAGAAGGG CCATTTCTTT |
| 901 | GTGGAGGATC AAATCTACTG TGAGAAGCAT GCCCGGGAGC GAGTCACACC ACCTGAGGGT |
| 961 | TATGAAGTGG TCACTGTGTT CCCCAAGTGA GCCAGCAGAT CTGACCACTG TTCTCCAGCA |
| 1021 | GGCCTCTGCT GCAGCTTTTT CTCTCAGTGT TCTGGCCCTC TCCTCTCTTG AAAGTTCTCT |
| 1081 | GCTTACTTTG GTT |

GENBANK ID: XM_016642.3
DEFINITION HOMO SAPIENS ADENYLATE KINASE 3 (AK3), MRNA.
VERSION XM_016642.3 GI:16163712
CDS 145..816
/CODON_START=1

| | |
|---|---|
| 1 | CCTTCCCCCT GTAGGGCCGG CCGGCGAGTC CCAGTGAGAG CGGAGGGTGC CAGAGGTAGG |
| 61 | GGGCCGAGAA ACAAAGTTCC CGGGGCTCCC TCCGGGGCCG CGGTCGGGGC TGCGCGTTTG |
| 121 | ACCGCCCCCC TCCTCGCGAA GGCAATGGCT TCCAAACTCC TGCGCGCGGT CATCCTCGGG |
| 181 | CCGCCCGGCT CGGGCAAGGG CACCGTGTGC CAGAGGATCG CCCAGAACTT TGGTCTCCAG |
| 241 | CATCTCTCCA GCGGCCACTT CTTGCGGGAG AACATCAAGG CCAGCACCGA AGTTGGTGAG |
| 301 | GTGGCAAAGC AGTATATAGA GAAAAGTCTT TTGGTTCCAG ACCATGTGAT CACACGCCTA |
| 361 | ATGATGTCCG AGTTGGAGAA TAGGCGTGGC CAGCACTGGC TCCTTGATGG TTTTCCTAGG |
| 421 | ACATTAGGAC AAGCCGAGGC CCTGGACAAA ATCTGTGAAG TGGATCTAGT GATCAGTTTG |
| 481 | AATATTCCAT TTGAAACACT TAAAGATCGT CTCAGCCGCC GTTGGATTCA CCCTCCTAGC |
| 541 | GGAAGGGTAT ATAACCTGGA CTTCAATCCA CCTCATGTAC ATGGTATTGA TGACGTCACT |
| 601 | GGTGAACCAT TAGTCCAGCA GGAGGAIGAT AAACCCGAAG CAGTTGCTGC CAGGCTAAGA |
| 661 | CAGTACAAAG ACGCGGCAAA GCCAGTCATT GAATTATACA AGAGCCGAGG AGTGCTCCAC |
| 721 | CAATTTTCCG GAACGGAGAC GAACAAAATC TGGCCCTACG TTTACACACT TTTCTCAAAC |
| 781 | AAGATCACAC CTATTCAGTC CAAAGAAGCA TATTGACCCT GCCCAATGGA AGAACCAGGA |
| 841 | AGATGTGGTC ATTCATTCAA TAGTGTGTGT AGTATTGGTG CTGTGTCCAA ATTAGAAGCT |
| 901 | AGCTGAGGTA GCTTGCAGCA TCTTTTCTAG TTGAAATGGT GAACTGATAG CAAAACAAAT |
| 961 | GAGTAGAAAG AGTTCATGAA GAGGCCCTCC TCTGCCTTTC AAAAGGGTGG TCACCTACAC |
| 1021 | ATGTTTAAGG TGTCTCTGCA CATGTCTCAA GCCCATCACA AGAAAGCAAG TACAGTGTGG |
| 1081 | ATTTCAAATG GTGTGTAACT TCAGCTCCAG CTGGTTTTTG ACAGCTGTTG CTGTGGTAAT |
| 1141 | ATTTTTTACA TGTGATGGTG ATAGTCTCTG GTTCTCCCCA TCCCCACAAA GGCTGTTGAA |
| 1201 | CCACACCACC AGGAAGCCTG AGAATGAATC CTGAGGGCTC TACCGCAGGC TTTGTCCCAG |
| 1261 | GCTTTCTGGT GTGTGCCCTC CTGGTAACAG TGAAATTGAA GCTACTTACT CATAGTGGTT |
| 1321 | GTTTCTCTGG TCTTGAGTGA CTGTGTCCAC AGTTCATTTT TTTCCGGTAG GAATAACTCC |
| 1381 | TTTTCTACAT CCACACTCCA TAGAGTCTCT CCTTTTCAGA TATCCTGGGA TGAAAGAATT |
| 1441 | TGGCTTTTTT TTTTTTTTTT TTTTTGACAT CTGTTTTCAC TCTTAGGCTT TTAAACAATA |
| 1501 | GTTATTGCTC TTATCCCTCT CAGATTCTAA TAACTGAGAG TGATGGGGCT ATATTGAATC |
| 1561 | TCTGTATGCA CTGAGAACTG AGCTATGAAG AGGATCTTAT TAAACTGCTG GTCTGACTTT |
| 1621 | ATGGATTGAC ACTGTTCCTT TCTTTTATTG TG |

GENBANK ID: Z35307.1
DEFINITION H. SAPIENS MRNA FOR ENDOTHELIN-CONVERTING-ENZYME 1.
VERSION Z35307.1 GI:535181
CDS 38..2299
/CODON_START=1

| | |
|---|---|
| 1 | CGCCCCCCCG GTGTCCGCCC TGCTGTCGGC GCTGGGGATG TCGACGTACA AGCGGGCCAC |
| 61 | GCTGGACGAG GAGGACCTGG TGGACTCGCT CTCCGAGGGC GACGCATACC CCAACGGCCT |
| 121 | GCAGGTGAAC TTCCACAGCC CCCGGAGTGG CCAGAGGTGC TGGGCTGCAC GGACCCAGGT |
| 181 | GGAGAAGCGG CTGGTGGTGT TGGTGGTACT TCTGGCGGCA GGACTGGTGG CCTGCTTGGC |
| 241 | AGCACTGGGC ATCCAGTACC AGACAAGATC CCCCTCTGTG TGCCTGAGCG AAGCTTGTGT |
| 301 | CTCAGTGACC AGCTCCATCT TGAGCTCCAT GGACCGCACA GTGGACCCCT GCCATGACTT |
| 361 | CTTCAGCTAC GCCTGTGGGG GCTGGATCAA GGCCAACCCA GTCCCTGATG GCCACTCACG |
| 421 | CTGGGGGACC TTCAGCAACC TCTGGGAACA CAACCAAGCA ATCATCAAGC ACCTCCTCGA |
| 481 | AAACTCCACG GCCAGCGTGA GCGAGGCAGA GAGAAAGGCG CAAGTATACT ACCGTGCGTG |
| 541 | CATGAACGAG ACCAGGATCG AGGAGCTCAG GGCCAAACCT CTAATGGAGT TGATTGAGAG |
| 601 | GCTCGGGGGC TGGAACATCA CAGGTCCCTG GGCCAAGGAC AACTTCCAGG ACACCCTGCA |
| 661 | GGTGGTCACC GCCCACTACC GCACCTCACC CTTCTTCTCT GTCTATGTCA GTGCCGATTC |
| 721 | CAAGAACTCC AACAGCAACG TGATCCAGGT GGACCAGTCT GGCCTGGGCT TGCGCTGGAG |
| 781 | AGACTATTAC CTGAACAAAA CTGAAAACGA GAAGGTGCTG ACCGGATATC TGAACTACAT |
| 841 | GGTCCAGCTG GGGAAGCTGC TGGGCGGCGG GGACGAGGAG GCCATCCGGC GCCAGATGCA |
| 901 | GCAGATCTTG GACTTTGAGA CGGCACTGGC CAACATCACC ATCCCACAGG AGAAGCGCCG |
| 961 | TGATGAGGAG CTCATCTACC ACAAAGTGAC GGCAGCCGAG CTGCAGACCT TGGCACCCGC |
| 1021 | CATCAACTGG TTGCCTTTTC TCAACACCAT CTTCTACCCC GTGGAGATCA ATGAATCCGA |
| 1081 | GCCTATTGTG GTCTATGACA AGGAATACCT TGAGCAGATC TCCACTCTCA TCAACACCAC |
| 1141 | CGACAGATGC CTGCTCAACA ACTACATGAT CTGGAACCTG GTGCGGAAAA CAAGCTCCTT |
| 1201 | CCTTGACCAG CGCTTTCAGG ACGCCGATGA GAAGTTCATG GAAGTCATGT ACGGGACCAA |
| 1261 | GAAGACCTGT CTTCCTCGCT GGAAGTTTTG CGTGAGTGAC ACAGAAAACA ACCTGGGCTT |
| 1321 | TGCGTTGGGC CCCATGTTTG TCAAAGCAAC CTTCGCCGAG GACAGCAAGA GCATAGCCAC |
| 1381 | CGAGATCATC CTGGAGATTA AGAAGGCATT TGAGGAAAGC CTGAGCACCC TGAAGTGGAT |
| 1441 | GGATGAGGAA ACCCGAAAAT CAGCCAAGGA AAAGGCCGAT GCCATCTACA ACATGATAGG |
| 1501 | ATACCCCAAC TTCATCATGG ATCCCAAGGA GCTGGACAAA GTGTTTAATG ACTACACTGC |
| 1561 | AGTTCCAGAC CTCTACTTTG AAAATGCCAT GCGGTTTTTC AACTTCTCAT GGAGGGTCAC |
| 1621 | TGCCGATCAG CTCAGGAAAG CCCCCAACAG AGATCAGTGG AGCATGACCC CGCCCATGGT |
| 1681 | GAACGCCTAC TACTCGCCCA CCAAGAATGA GATTGTGTTT CCGGCCGGGA TCCTGCAGGC |
| 1741 | ACCATTCTAC ACACGCTCCT CACCCAAGGC CTTAAACTTT GGTGGCATAG GTGTCGTCGT |
| 1801 | GGGCCATGAG CTGACTCATG CTTTTGATGA TCAAGGACGG GAGTATGACA AGGACGGGAA |
| 1861 | CCTCCGGCCA TGGTGGAAGA ACTCATCCGT GGAGGCCTTC AAGCGTCAGA CCGAGTGCAT |
| 1921 | GGTAGAGCAG TACAGCAACT ACAGCGTGAA CGGGGAGCCG GTGAACGGGC GGCACACCCT |
| 1981 | GGGGGAGAAC ATCGCCGACA ACGGGGGTCT CAAGGCGGCC TATCGGGCTT ACCAGAACTG |
| 2041 | GGTGAAGAAG AACGGGGCTG AGCACTCGCT CCCCACCCTG GGCCTCACCA ATAACCAGCT |
| 2101 | CTTCTTCCTG GGCTTTGCAC AGGTCTGGTG CTCCGTCCGC ACACCTGAGA GCTCCCACGA |
| 2161 | AGGCCTCATC ACCGATCCCC ACAGCCCCTC TCGCTTCCGG GTCATCGGCT CCCTCTCCAA |
| 2221 | TTCCAAGGAG TTCTCAGAAC ACTTCCGCTG CCCACCTGGC TCACCCATGA ACCCGCCTCA |
| 2281 | CAAGTGCGAA GTCTGGTAAG GACGAAGCGG AGAGAGCCAA GACGGAGGAG GGGAAGGGGC |
| 2341 | TGAGGACGAG ACCCCCATCC AGCCTCCAGG GCATTGCTCA GCCCGCTTGG CCACCCGGGG |
| 2401 | CCCTGCTTCC TCACACTGGC GGGTTTTCAG CCGGAACCGA GCCCATGGTG TTGGCTCTCA |
| 2461 | ACGTGACCCG CAGTCTGATC CCCTGTGAAG AGCCGGACAT CCCAGGCACA CGTGTGCGCC |
| 2521 | ACCTTCAGCA GGCATTCGGG TGCTGGGCTG GTGGCTCATC AGGCCTGGGC CCCACACTGA |
| 2581 | CAAGCGCCAG ATACGCCACA AATACCACTG TGTCAAATGC TTTCAAGATA TATTTTTGGG |
| 2641 | GAAACTATTT TTTAAACACT GTGGAATACA CTGGAAATCT TCAGGGAAAA ACACATTTAA |
| 2701 | ACACTTTTTT TTTTAAGCCC |

GENBANK ID: J02683
DEFINITION HUMAN ADPATP CARRIER PROTEIN MRNA, COMPLETE CDS.
VERSION J02683.1 GI:179246
CDS 70..966
/CODON_START=1

| | |
|---|---|
| 1 | CCGCAGCGCC GTAGTCAAAC CGAACCCGGC CCAGTCCCGT CCTGCAGCAG TCTGCCTCCT |
| 61 | TCTTTCAACA TGACAGATGC CGCATTGTCC TTCGCCAAGG ACTTCCTGGC AGGTGGAGTG |
| 121 | GCCGCAGCCA TCTCCAAGAC GGCGGTAGCG CCCATCGAGC CGGTCAAGCT GCTGCTGCAG |
| 181 | GTGCAGCATG CCAGCAAGCA GATCACTGCA GATAAGCAAT ACAAAGGCAT TATAGACTGC |
| 241 | GTGGTCCGTA TTCCCAAGGA GCACCAAGTT CTGTCCTTCT GGCGCGGTAA CCTGGCCAAT |
| 301 | GTCATCAGAT ACTTCCCCAC CCACGCTCTT AACTTCGCCT TCAAAGATAA ATACAAGCAG |
| 361 | ATCTTCCTCG GTGGTGTGGA CAAGAGAACC CAGTTTTGGC GCTACTTTGC AGGGAATCTG |
| 421 | GCATCGGGTG CTGCCGCAGG GGCCACATGC CTGTGTTTTC TGTACCCTCT TGATTTTGCC |
| 481 | CGTACCCGTC TAGCAGCTGA TGTGGGTAAA GCTGGAGCTG AAAGGGAATT CCGAGGCCTC |
| 541 | GGTGACTGCC TGGTTAAGAT CTACAAATCT GATGGGATTA AGGGCCTGTA CCAAGGCTTT |
| 601 | AACGTGTCTG TGCAGGGTAT TATCATCTAC CGAGCCGCCT ACTTCGGTAT CTATGACACT |
| 661 | GCAAAGGGAA TGCTTCCGGA TCCCAAGAAC ACTCACATCG TCATCAGCTG GATGATCGCA |
| 721 | CAGACTGTCA CTGCTGTTGC CGGGTTGACT TCCTATCCAT TTGACACCGT TCGCCGCCGC |
| 781 | ATGATGATGC AGTCAGGGCG CAAAGGAACT GACATCATGT ACACAGGCAC GCTTGACTGC |
| 841 | TGGCGGAAGA TTGCTCGTGA TGAAGGAGGC AAAGCTTTTT TCAAGGGTGC ATGGTCCAAT |
| 901 | GTTCTCAGAG GCATGGGTGG TGCTTTTGTG CTTGTCTTGT ATGATGAAAT CAAGAAGTAC |
| 961 | ACATAAGTTA TTTCCTAGGA TTTTTCCCCC TGTGAACAGG CATGTTGTAT TCTATAACAC |
| 1021 | AATCTTGAGC ATTGTTGACA GACTCCTGGC TGTCAGTTTC TCAGTGGCAA CTACTTTACT |
| 1081 | GGTTGAAAAT GGGAAGCAAT AATATTCATC TGACCAGTTT TCTCTTAAAG CCATTTCCAT |
| 1141 | GCATGATGAT GATGGGACTC AATTGTATTT TTTATTTCAG TCACTCCTGA CTAAATAACA |
| 1201 | ATTTGGAGAA ATAAAAATAG TCTAAAAT |

GENBANK ID: M22760.1
DEFINITION HOMO SAPIENS NUCLEAR-ENCODED MITOCHONDRIAL CYTOCHROME C OXI-
DASE VA
SUBUNIT MRNA, COMPLETE CDS.
VERSION M22760.1 GI:695359
20..472
/CODON_START=1

| | |
|---|---|
| 1 | GGGCGCCGCC ATCGCCGTCA TGCTGGGCGC CGCTCTCCGC CGCTGCGCTG TGGCCGCAAC |
| 61 | CACCCGGGCC GACCCTCGAG GCCTCCTGCA CTCCGCCCGG ACCCCCGGCC CCGCCGTGGC |
| 121 | TATCCAGTCA GTTCGCTGCT ATTCCCATGG GTCACAGGAG ACAGATGAGG AGTTTGATGC |
| 181 | TCGCTGGGTA ACATACTTCA ACAAGCCAGA TATAGATGCC TGGGAATTGC GTAAAGGGAT |
| 241 | AAACACACTT GTTACCTATG ATATGGTTCC AGAGCCCAAA ATCATTGATG CTGCTTTGCG |
| 301 | GGCATGCAGA CGGTTAAATG ATTTTGCTAG TCTAGTTCGA ATCCTAGAGG TTGTTAAGGA |
| 361 | CAAAGCAGGA CCTCATAAGG AAATCTACCC CTATGTCATC CAGGAACTTA GACCAACTTT |
| 421 | AAATGAACTG GGAATCTCCA CTCCGGAGGA ACTGGGCCTT GACAAAGTGT AAACCGCATG |
| 481 | GATGGGCTTC CCCAAGGATT TATTGACATT GCTACTTGAG TGTGAACAGT TACCTGGAAA |
| 541 | TACTGATGAT AACATATTAC CTTATTTTGA ACAAGTTTCC CTTTATTGAG TACCAAGCCA |
| 601 | TGTAATGGTA ACTTGGACTT TAATAAAAGG GAAATGAGTT TGAACTG |

GENBANK ID: 5118079
DNA LINEAR
DEFINITION HUMAN, INTESTINAL FATTY ACID BINDING PROTEIN GENE, COMPLETE
CDS, AND AN ALU REPETITIVE ELEMENT.
VERSION M18079.1 GI:182351

| | |
|---|---|
| 1 | GTAATATCTT GGGCAAGCCC TAGAGCTTCT TTCCTGACCC TTAGTTAATA AGATGTTATC |
| 61 | TGGTCACATT CAGTCACAAT AATAGACTCA TTTTAGTAAT AAACATCTTA AGACTAGTAA |
| 121 | TTAAAACTCT TTACTTCACA CCAAGTTTCC TCCCCAAGCT TGGCCTGTTC CTGGCTGGCA |
| 181 | GCCTGAAGTA GGGAAAGGAG AGATATGGTG ACCTTTTCTT TGTACCTTTC TAGCTACCCT |
| 241 | CTATACCCTG ACCCCACATA CATAATTGAG CTGTGGCTTC TGACTCTACT GGGTTTGGGG |
| 301 | ATGAGAGGCA GTGAGAGTAA AATGAAGGAG TGGTTTTAAT TAATGGCACA GCTAAAACTG |
| 361 | GATTTTGTTC TCTCTGCACA TGGCAGATGT TTAAAGCTCA TTCTTTCTTT TATGCAAGTT |
| 421 | TTTACACCAT CCAGCCTCAT TTGTACCTCT TGAATTTTTG CTCAGTGGCC TATCACCATT |
| 481 | CAGGATCAAG ACAAAAATCA ATGAGCACTT ATTGTGTGTC ATGCACCCTA CAAAGTGCCA |
| 541 | GGATATTTAT CCAAACTCCT GGCAATGCTA AACACAATGC AAAAAGACAT ATTAGAAAAC |
| 601 | GAATCTTATT AACTTTAGCT TTTCAACTGT ATTTCATCAT AAAGTCTTAC TTTACAAGAT |
| 661 | AATTGCTGTT GTGAAAAAGG GAAAGGTCAT GGTCTCATTT CCCAGATGTT ATTTGATATA |
| 721 | TGCTATAAAT TATATTACCT CCAACATAGT CTGCACTTTG AACTTAGAAA AACAATCTTC |
| 781 | AGACGGCATG CATTCTAATT CTTGAAATAA GTATGCCCAC AAACTGTAGT TTAAGACAGA |
| 841 | ATAGGTATGC TTCTCATGTT TTAATTCAGT TGAATTTCAG AAGATCTCAG GAATGTACAG |
| 901 | AACGAGAATT AAGAATTAAT AAGAATAAGA ATTAATTAAT TGCTTGACAT AGAGTAGTTA |
| 961 | GGTGATTTCC TGAACTTTAA GCTTCCACAT CACACTATGA AGTTGGTTCA AGATAAGAAA |
| 1021 | TATAATAAAT TCTCGCCCAA GGACAGACCT GAATCTCTAG CTGCCTAGAG GCTGACTCAA |
| 1081 | CTGAAATCAT GGCGTTTGAC AGCACTTCCA AGGTAGACCG GAGTGAAAAC TATGACAAGT |
| 1141 | TCATGGAAAA AATGGGTAAA GACTTTATTT CTTTGTGCCT CATTCTTTGC TTTCTTACAA |
| 1201 | ACATTTTTCT TTCTAACTCC TAAATCTCTA GGAGATTACA GATAGCTTAC AGATAGCTCC |
| 1261 | TGATGTGGTA GAGACGGATC CAGAAGATGT TCAGAGGAGG GAAACCATAT TTTCCCTTCT |
| 1321 | TACATTAGGA AGAATCCACT ATCTCACTAA TGCAAGAAAA GATTCTTTGA GTGCTGTTCT |
| 1381 | CTGAAACACA CCAAAAAGAT CCAGAAATGT TTCCTTCACT CTTTAACTGA AAAATGACTT |
| 1441 | TTTTTCTTGT TTACAGTAAG AAAATGGCAG CGTGTAATGA TAACTTCCAG ATCTGAAAAT |
| 1501 | GTTAAATTCT ACGAGATGGA AAAACAAAGA CCATATAACA AAGTAATGGA AAAAGTTCTC |
| 1561 | TTAAAATTTA TAGCTCTGAA TAAGTTAGAT TTAATTCTGA TTTCTTCTAA CTTAAAAAAG |
| 1621 | TTTTGGAATA ATCTTGAGAA GCTGTGTAGT TTTCTCCAGG GCGTTTAATT TAACTGATTT |
| 1681 | ATAATTTGAT ACCAATACTC TGGCAGCCCA TATACTATAC AAGATAGGCA AACAAATTTG |
| 1741 | TGTCATTCCC CTAAAAGAAA AATCTGCATC AATTATAGCT TACAGTTTAG GAACTCTAAG |
| 1801 | TTTAAATTTA TAAAAGTTGT AGATTCTTAT AGTGATTTTG GCTTAATATT TGCTAATTTT |
| 1861 | CTCATTTTTG TGTCAGAAAG AAATGCCACA AGAAGCAAAT AGAACTATAA AGTTCAAAAT |
| 1921 | GTTAAAGCCA CTAAGAAAAA CAAAGGGGCA TTTAAGAAAA AAGAATACTG TATATGTGGA |
| 1981 | ATTAAAGATG TGCTTCCTTA TAAATATATG AATATACATT TTAATCCTTC ATTTAATATT |
| 2041 | TCTAGAATTT GATTTACTTA ACACTGAAAT GAACAGTTTG TTAATCTTAT TAAGGTTGCT |
| 2101 | CAGCTCTAAG ATTCTATAAT TCTGTACTCT ACTTAATTTT TCTCAAGTTA TGGAAAAACA |
| 2161 | ACTTTAATCA GTTCTCTTGA TCGGATTGAA CCTGAACTTC TATAGAAGCA ATCTGAATGT |
| 2221 | TCTTGTGCAA AGGCAATGCT ACCGAGTTTT CTTCCCACCC TCAAAATAAA CAAACAAAAC |
| 2281 | ATAACTTGGA AAAATAAACA CTTCCTATGG GATTTGACTT TATTTTCTCC ATTGTCTTAC |
| 2341 | CTTTTACAGG TGTTAATATA GTGAAAAGGA AGCTTGCAGC TCATGACAAT TTGAAGCTGA |
| 2401 | CAATTACACA AGAAGGAAAT AAATTCACAG TCAAAGAATC AAGCGCTTTT CGAAACATTG |
| 2461 | AAGTTGTTTT TGAACTTGGT GTCACCTTTA ATTACAACCT AGCAGACGGA ACTGAACTCA |
| 2521 | GGGTAAGAAT TTTTTTTTTT ATGAGCAATG CATTCTTGAT TTTTCTACCC AATATTAAAA |
| 2581 | TGATTTCTGC TCTATTTCAT TGGATGGTTT AATTAATGCA GGTCTCCTTC ACTAACTGAA |
| 2641 | GAAGCCAATG AAGTTTGTCT ACATTATATA TTACACAAAT TGGCAGGGTA TTTAAATATG |
| 2701 | CTTTTATTTT TATACGCATC TGTGAAGAAT CTGAATTGAA CAGTAAGAAT TAGAAAACTA |
| 2761 | TCTTTTGAAT GACTGAATAT AGACCTATTC ATAAAGAAAT TTAAAACTGT GTTTTTAAAC |
| 2821 | AGTACAGCAA AACAAGCCTT TAGAGTTAAT ATGTAACTTA ACTGTAACAT GTTGAAATAA |
| 2881 | TAAAAGAAAT GAATAGATGA ACAAATGACT GAGTTACCAA ATGGAAAGAT TTGATGTATT |
| 2941 | GTAGGTCATT GGCAGTGTAC CTTTTCATGT TTAAGATAAC ACATTTTAGG AAGTCATCAT |
| 3001 | TTTCAACAAA TTTTTTAAAA ACTTTTTTTA GCCTCAACAT TTTTCTATTT AAATTACATG |
| 3061 | TTTGTAATGA CAATTTAACT ACTGAATGTT TTATCGTAAG TTATCTCTTT CCTTAATTAG |
| 3121 | TACCACAATC ACACAAATTA AAACAAGCAC AGGTTATTAA CATCTCCGTG AAACTAATTT |
| 3181 | TAACCATGAC TATATTTCTG GACACGTAAC ATGAAAGATT CAGAAAGAAG TGCTGCTCAT |
| 3241 | CTGCCTTAAA ATTCAGCGTA TGCAAATTAT TGAAGAGAAC AAGCATAATG GTTATCAACA |
| 3301 | CATACTCTGT AGCCCAATGG CCTAGGTTCA ATCCTCACTC TGTGACTTTA GGTGAATCAC |
| 3361 | TGTGCCATTT TACAGTCTCC TCTTCTGCAA ACTAGAGATA GTAGTATCAG TTTCATAGGG |
| 3421 | TCACCATGAA GATTAAATGA AAAAGTGTGT CTACAGAACT CAGAACAGTG CCTGACATGT |
| 3481 | GTAAGACCCT AATAAATGCC ATTATTATTA TTATTATTAT TATTATTATT ATTATTATTA |
| 3541 | TGTAGGGGAC CTGGAGCCTT GAGGGAAATA AACTTATTGG AAAATTCAAA GGGACAGACA |
| 3601 | ATGGAAACGA ACTGAATACT GTCCGAGAAA TTATAGGTGA TGAACTAGTC CAGGTGAGTT |
| 3661 | GTCAAATTTA TAGCTATTTT CAAAAGGCAA AAATTACTAC AAAACAATAA TTTTTGTCAC |
| 3721 | TGCTGAGCCA GATCTTCAGT AAACTGACTA CTTCTTTTCT CATAAATCTT ACTGATTTTA |
| 3781 | AAAATATTGT ATAGCTATTT TCTGATGCCT ATTTACTAAA GACAACTTAT ATATGTCAAA |
| 3841 | TAATCAATGC CTATTTTAAC TGAAAATATA AATGACTACA AACCAACATG TGTTTTAAAA |
| 3901 | TGGCTGTATC CCATATCTGT ATAAATCTTG CTATCAAGTA CAAGAAAAAA TTGTATAAAC |
| 3961 | TCATACTCAT ATAATATATA TGAATATATA ATATAAAAAT AGTATAAACT CATATACTAT |
| 4021 | AAAACTATAA TACTACTTTT TCTTAACTTA GATGTAAACC TTAAAGATAA ATTCTTCTGT |
| 4081 | TTGTTAACAC CTTTCAGACT TATGTGTATG AAGGAGTAGA AGCCAAAAGG ATCTTTAAAA |
| 4141 | AGGATTGAGC ATTATTCTTG GCGCACAGTC CAAAATACAA ATTGGACAGA AGATCTATAT |
| 4201 | TGTACCAGAA CTGTTTATTT CACCCCATCA AGTATAAGGT TACTGATTGA TTGGTCCTTT |
| 4261 | TATAAACATT GGTATATTTC CATTCATGCC AAAGCAAAAG AAGTAAAAGC TAATTAGGAT |
| 4321 | TTAATTTGTT TTATATTCTC TAAGATATAT ATTTACTAAA AGAATTTGTG ACATTTTAAA |
| 4381 | AAACAAAAAT AAATATTGCA TCCATGTTGC TTTATATGTA GCCTTGCCTT TTAAAAGAAA |
| 4441 | AAGTATGTGA ATATGAATTG ACAGATTGTT TTCGTAGAGA GAGGGTCTTA CTCTTTCACT |
| 4501 | CAGGCTGGAA TGCAGTGGAG AGATCATAGC TCACTGTAAC CTCAAACTCC TGGACTCATG |
| 4561 | CAATCTTCCT GCCTCAGGCT TCTGAGTAGC TAGGACTATG GGTACATTCC ACAGTGCCCA |
| 4621 | GCTAATTTTT GTTTTGTTTT CTTTTTATTT TTTTTAGAGA TGGGGTCTTG CTATATTGCC |
| 4681 | CAGGCTGGTC TTGAACCCCT GGCCTCAAGC AATCCTCCTG CCTCAGCCTC TCAAGTTGTT |
| 4741 | TTTTTCTTTA CATTTGATAA ACTAAAAGCA TAGGCTGCAT ATGAGTCTTT AACATCTTGA |
| 4801 | ACTGGTTGTG AATAATTTTC TGGCACTGGT TGTAAGTAAT ATCTATTATT ATAAAAATAA |
| 4861 | TATATGCTCA ACCAGAAAAC TTAGAAATAA GAAACACAAA TGTAAAATAA GTATTTCCAT |
| 4921 | AACTCATAAT CCAGAGATAA TTGCCATTCT GATTTTGATA GATATCCTCT CAGCTCTCTT |
| 4981 | CCCTGGGGGC AGATATTTCC CAATACATAC CACTTTGAAT AGGATGATAG GAAATAAATG |
| 5041 | ATGTACTACA TTAAATTAAA TTATTGTATT ACATTTTTGT ACACATCAGT CATTCCCAGG |
| 5101 | CTTGGCTGAA AATCAGGATC ATCTGAGAAA CTTAAACAAT TTCTGCATTC TTAATCTCCA |
| 5161 | CTGTTATTCT ATTATATCAG AATCGCTAAT AGAACCAAGA ATTC |

GENBANK ID: X16277
DNA LINEAR
DEFINITION HUMAN GENE FOR ORNITHINE DECARBOXYLASE ODC (EC 4.1.1.17).
VERSION X16277.1 GI:35137
MRNA JOIN(795..1001,3858..3967,4073..4191,4475..4648,
4855..5027,5286..5420,5551..5632,5809..5892,6948..7110,
7193..7305,7399..7613,8254..8740)

| | |
|---|---|
| 1 | GGATCCGGGT CCCCTCACGC TCCTGGCTGA GTCCCTGGCT TCACAGGGGA AACTACCTCC |
| 61 | GCAGGCCAGG ACCCATCTAG TTACACGATA CCTCGATGTT ACAAAGACGA GGCTTCCAGC |
| 121 | GCGGGGGCGT GGAGGCGGCT GCCAGCCCTG CCCGCAGCGT GCTGGCGACC CCCGGGACGC |
| 181 | CCCTTCCCTC CCGCGCCTCT GCTCCCTAGC TGGTGGGAGC AGAGCGCACC GGGATCACTT |
| 241 | CCAGGTCCCT TGCACCGGAG GAATGGGCGG CAGCAGGGTC CGGAGTCGGC CCGGCGGGGC |
| 301 | CCACGTGGCC AGCACATCGG TCCTCCGCTC GCGATTTCCC TTTTCCGCTC TCGGGCACGA |
| 361 | GGTACTGAAC GCCAGGTGGA AGCACAGCTG TGCAGGTACA GGCTCTGCCG TTCAGCTGCC |
| 421 | GCGGGCCGGG GCCGGGGCCT GCGGCGTCGT GCGCGTGCGC GGACCAGTTC CAGGCGGGCG |
| 481 | AGACCGCCGC AGGGCGGGGC GGGGCGAGGC GGCCGCAGGG CGGGGAGGGC GGGGAGAGGC |
| 541 | GGCCGCAGGG CGGGGAGGGC GGGGCGCGAA GCCGGGGGCG GGGGCCACGC GTGGGGCAGG |
| 601 | CGGTGCTCGG CTCGGCTGAC GTCGGCCCGC CGGCGCCCCA CCAGCTCCGC GCGGGCCCGG |
| 661 | GTTGGCCACC GCCGGGCCCC CGCCCCTCCC CCGGCCGTGT CCCGGCCGGA ACCGATCGTG |
| 721 | GCTGGTTTGA GCTGGTGCGT CTCCATGGCG ACCCGCCGGT GCTATAAGTA GGGACCGGGG |
| 781 | TGCCGTGGGG CTTTGTCAGT CCCTCCTGTA GCCGCCGCCG CCGCCGCCCG CCGCCCCTCT |
| 841 | GGCACCAGGT CGGGCGCCAC CTCGGGCCGG CGTCTCCGGC GGGCGGGAGC CAGGCGCTGA |
| 901 | CGGGCGCGGC GGGGGCGGCC GAGCGCTCCT GCGGCTGCGA CTCAGGCTCC GGCGTCTGCG |
| 961 | CTTCCCCATG GGGCTGGCCT GCGGCGCCTG GGCGCTCTGA GGTGAGGGAC TCCCCGGCCG |
| 1021 | CGGAGGAAGG GAGGGAGCGA GGGCGGGAGC CGGGGCGGGC TGCGGGCCCC GGGCCCCGGG |
| 1081 | CACGTGTGCG GCGCGCCTCG CCGGCCTGCA GAGACACGTG GTCGCCGAGC GGGCCACGAC |
| 1141 | CTTGAGGCGC CGCTTCCTCC CGGCCCGGGG TTCTCCCGCG GCTGGATAAG GGTGATCCGG |
| 1201 | GCGCCTCGTT CTGCCCCCGT CTTCACAGCT CGGGGCTGGA GGGGCCTAGG GGAGACCCAC |
| 1261 | CCGGAGACCC TGCGGCCCCG CGCCGGCCTC TTTCCCAACC CTTCGGCGGC CGCGCGCTGG |
| 1321 | CCGGGGAGCC GTTGGGGAGG CCCTGGCGGC CGCGCAGCAG GTGCAGGGGC GCAGAGCCTG |
| 1381 | GGCTCGCCTT GGTACAGACG AGCGGCCCCG GCCTTGGCGC CTTCAGTTTC CTTCCAGTTT |
| 1441 | TTATTTTCGC TGTGTCTACA GAGCAGATGA CACCAATTTG GAAACCCGCG AGAGTGGGTA |
| 1501 | GAGCTAAGAT AGTCTTGCTG TAGTAGCTGT GATATTAGAT GCTCGGCCAT GACTTAGAGG |
| 1561 | TGTTTATTTA AGGACTGTGA ATGACTCGGT GATTTCGGAA AAGCTTGGCT TAGATGAACG |
| 1621 | GACATACACA GGGGAGACAG CCCTAAGGTT TGCAGAAAAG GCTGATTGTG CTGTTTGCGA |
| 1681 | AGTCGAAATA ATTGGTGAAA GTGTAGAAGG CAGAACCTCT CAGGAATGTC TGOGGAGGAC |
| 1741 | AAAGAATGTG TTGGCTGACT TTGTTTAAAC ATAAAATTGG GCAGACTTTA ATTGATTTGT |
| 1801 | GAAATTTTTT TCAAAGTTTG TTTGAATTAG CCCCTATCTC TTCTAACATT ATCCTCTTGT |
| 1861 | GCTAATTGAT TGACCATTTT AAATAACTTA GGTGTTACAG AAAGACCGAA AGGTGTTCTT |
| 1921 | CAGTAAAATA TATTCAAGTA AGTTACTTAA GTAACGCCTT AAAAGATACA GAAAAGCAAA |
| 1981 | AAAGTATTGG CGTATTAAAA AGAAATCAAA ACTTTCCAAG TTTAGGCCTG AACATTGCCT |
| 2041 | TAAAAATATT TAATAAGGCC TCAAATGACC CAGTCCGAGA CTGCATGAGC CTATTTATTA |
| 2101 | TTAAATTGTA AATATTCTTC ATATAAACAA AAATATATAA CCATGTCTGT AACAAAAATG |
| 2161 | GTTTTGCTAG CGTTGTTACT CTCTTCCCTT CTCCGAGGGG TGATTTAGGC AACTTCGGAG |
| 2221 | GTTGACAATG CCAAGCAGTC ACAATAGATA GAGCTTTAAA GCAAATTCTA TGCATGGGTT |
| 2281 | TGGATTTATG ACAGGCCCGT CACCCTGGGC CTGTCATAGT ACCCCATGCC AGAGCAAACT |
| 2341 | GTGTCCCCGA ACCATTGCCT GGCCTCTGTG CCCGTAGGCT GCTGGCACTG AAGTGGGTTG |
| 2401 | CACAGTGGAA AAGAAGAAAG CTCTACCTGG CAGAAATTTT TAAAGGTTAA AATAAATAAT |
| 2461 | TTTAAGAAAG CTGGTTCACA AGGTGCCACA TTTGATGAAA GCAAAATACA GTGGCTTTTA |
| 2521 | TTGTTACTAG AGTGATGTTC TTGCTTGTTT TTCTTTTTTG GTGAAGTTAG CCCCAAATTA |
| 2581 | TTCTCATAGC TAAGCAAATA CGAGAGTGAC TGTAAGGACA GTTGGCATTC CCGGAATTGC |
| 2641 | TAAACTTGGT AGGCAACGCT GGTTTAAGAA TACTGAGTTC TAGCCGGGCG TGGTGGCTCA |
| 2701 | CGCCTGTAAT CCCAACACTT TGGGAGGCTG AGGCAGGCGG ATCACCTGAG GTCGGGAGTT |
| 2761 | GGAGACCAGC CTGACTAACA TGGAGAAACG CCATCTCCAC TAAAAATATA AAATTAGCCA |
| 2821 | GGCCCCGGGT GTGGTGGCAC ATGCCGGTAA TCCCAGCTAC TCGGGAGACT GAGGCAGGAG |
| 2881 | AATCGCTTGA ACCCAGGAGG CGGAGGTTGA GGTGAGCCGA GATCATGCCA TTGCACTCCA |
| 2941 | GCCTGGGCAA CAAGAGTAAA ACTCTGTCTC AAAAAAAAAA AAAAAAAAAT ACTGAATTCT |
| 3001 | GATCAGGTAA CAGCAACTGT AATACAATGT GATAAGTTGA CTTGAAGATT ACAGTTTTTA |
| 3061 | AGAAGTATAT ACCCAGCTAA TACATGAAAA TTAACTCCTA AAATCTCAAA TGCTCCAGAC |
| 3121 | ATTTCCATGA TGCCTGTTGG TCAGTAAAAA TCATTCTAAG ACTTAGTGGA AGTAGGAAAT |
| 3181 | GTTTGTATGG CTGTGTATAA AGGCTATAAT GTAATCCCAG CACTTTGGAA GACCGAGGCG |
| 3241 | GGACGATCAC CTGGGGTCAG GAGTTTGACA CCCACCTGGA CAACGTGGTG AAATCCTGTC |
| 3301 | TCTACTAAAA ACACAAAAAT TAGCCGGGCA TGGTGCCAGG CGCCTGTAAT CCCAGCTGCT |
| 3361 | GGGGAGGCTG AGGCAGGAGA ATCGCTTGAA CCCGGGAGGC AGAGGTTGCA CTGAGCCAAG |
| 3421 | ATTGCACCGC TCCACTCCAG CCTGGGTGAC AACCTGAGAC TCTGTCTCAA AAAAAATAAA |
| 3481 | AAAGTCTATA ATGCTATTTT AAGTTTCTAA GGAACTGAAA CTGCTCTGAA ATAAATCAGA |
| 3541 | CCATTATAAG ACTTTTTTCC ATATCAGTGA GCTAAGTGCA GATAAGCTTC TGAAACTTCC |
| 3601 | ATGCTAGATT TTTTTGGTAC AAATATTTGA AATGCTTAGT GTCCTGCCTT GGAAAAACCT |
| 3661 | GGTATTTTTT GTTGTCTCCT TATACTGCCA AGGTTTATGC AATCATGTAC CTTATGCCAA |
| 3721 | GTAATAATTA GGATGACCAG GCCAGTGAGT GGTTCATATC CCGGGCATGA TTAGCTCTGC |
| 3781 | GTGTGCTCAG CCAGTGCCCC ATCTTCAACT CGATGTGTTC CTAACGTAGA CACCAAATTC |
| 3841 | CCTATTTTAT TTCTCAGATT GTCACTGCTG TTCCAAGGCC ACACGCAGAG GGATTTGCAA |
| 3901 | TTCCTGGAGA GTTGCCTTTG TGAGAAGCTG CAAATATTTC TTTCAAITCC ATCTCTTAGT |
| 3961 | TTTCCATGTA AGTATTCAGT TTACATTTAT GTTGCAGGTT AATCTTAAGA ATTGTATTGC |
| 4021 | TAAGGCTTCT AAGTGAATTT CTCCACTCTA TTTGCATTTT GTTGCATTTC AGAGGAACAT |
| 4081 | CAAGAAATCA TGAACAACTT TGGTAATGAA GAGTTTGACT GCCACTTCCT CGATCAAGGT |
| 4141 | TTTACTGCCA AGCACATTCT GGACCAGAAA ATTAATGAAG TTTCTTCTTC TGTAAGTATA |
| 4201 | TGAGGCCCAT CCTGGCAGTG CAGCTGAGAG TCCCAGGCAA GTGGAAAACT TTGGCAAGGT |
| 4261 | CTAAGGAAGA GCAATGAGGC TTACATGTCT TGTTATGGAA TGTAGAAATT AATTCACTGG |
| 4321 | TGGTAAATTA ATAGTGATAA TGCTGATACT CATATCAGTC GCTAGACTCA AAAGAGCAGG |
| 4381 | ATTCATTGTG ACTGATGGGA ATGAAGGTCG CTGGCTATTG GTGTGGTGTG TGGTGAGGCT |
| 4441 | GCTAGTGAGT CACCTGTGAC CACTCTTGTT TCAGGATGAT AAGGATGCCT TCTATGTGGC |
| 4501 | AGACCTGGGA GACATTCTAA AGAAACATCT GAGGTCGTTA AAAGCTCTCC CTCGTGTCAC |
| 4561 | CCCCTTTTAT GCACTCAAAT GTAATGATAG CAAAGCCATC CTGAAGACCC TTGCTGCTAC |
| 4621 | CGGGACAGGA TTTGACTGTG CTAGCAAGGT AAGCGATAGC AGCAGGCCTC AAAAGCGTTG |
| 4681 | TATAAAATGC GCCTGGTATT CCCCACGAGG CACATACAAG TTGTGTTTTT TGGGCAATAA |
| 4741 | ATGCTCACTA AAGGCAAATG GGCCGGGGGG GTACATGACA ACTTCCCATG CTTTTCTGTT |
| 4801 | TATTCCACGT GTTAAGCCAC ATATGGATAG CATGACACCA CTCTTCTTTT TCAGACTGAA |
| 4861 | ATACAGTTGG TGCAGAGTCT GGCGGTGCCT CCAGAGAGGA TTATCTATGC AAATCCTTGT |
| 4921 | AAACAAGTAT CTCAAATTAA GTATCCTGCT AATAATGGAG TCCAGATGAT GACTTTTCAT |
| 4981 | AGTCAAGTTG AGTTGATGAA AGTTGCCAGA GCACATCCCA AAGCAAAGTG AGTTATTCCC |
| 5041 | CCATCTGAGG GCAAGATCGG GAGCATAAGA TATCTGGATT CTTATCAAAC AAACTTAAAT |
| 5101 | TTCTGATTAT TATATTTCTA TACTTTAGTA GAAAGTAGTT GAAACCCCCA TTGAGTCATG |
| 5161 | AAGCCTGGGA CTCAAACTAC AGAATATATC AGCGACAGTA TTTAGAACAG GATTGTTTTT |
| 5221 | ATTTTAATTG TGGCTATAAG TGAACATCTA TCATGAGACA TTTGCTGCAC TTTCCTTGCT |
| 5281 | TGTAGGTTGG TTTTGCGGAT TGCCACTGAT GATTCCAAAG CAGTCTGTCG TCTCAGTGTG |
| 5341 | AAATTCGGTG CCACCCTCAG AACCAGCAGG CTCCTTTTGG AACGGGCGAA AGAGCTAAAT |
| 5401 | ATCGATGTTG TTGGTGTCAG GTGAGATTTT GGTGGGATAG CTAGAGGTCA AGACATTGAA |
| 5461 | CAGTTTGAGT TTTACAGGCT TTCTCCTAGT GTTTGCTATT A |
| TTTAAGAA ATACTAAGAC | |
| 5521 | ACAGTGTCTC GTCTCTTTAT TTTACCCCAC CTTCCATCTA GGAACCGGCT GTACCGATCC |
| 5581 | TGAGACCTTC CTGCAGGCAA TCTCTGATGC CCGCTGTGTT TTTGACATGC GGGTGAGTAT |
| 5641 | ACGTGACCCT GTTAGGCAAG GGCGGGACAC AACTGACAAT AACTAGTCTT AATTCTAGAG |
| 5701 | TTAACTTTTT A2GGCAGTTG GTTCTCTATT ACATGGGTTT CAGCCTATCT GCTGCATACA |
| 5761 | TTTTTGTTAT TACCTGTGGA TCTGGCTGAC TTATTTTCTT CATTCTAGGC TCAGGTTGGT |
| 5821 | TTCAGCATGT ATCTCCTTGA TATTGGCGGT GGCTTTCCTG CATCTGAGGA TGTGAAACTT |
| 5881 | AAATTTCAAG AGGTAATTTA GAACAAAACT GTAATACTCA GTAGCCGTTC TAATAAATTC |
| 5941 | CTTTTTGGAA TATTTCAAAA TTTAAGTGTC TTAACTAATA CCACAATGGG CTGAAGTGTC |
| 6001 | TTGGTGTGAT ATTTTGAGTG ATTTCTTTGT GCTGTCTGAC ATTACACTTG ATACCATTTG |
| 6061 | GTTTTCTAAA GTGTGAATCA GCTTTCCCAG AAGTCTTGGA TAAATGGTTA CATTGGAAAT |
| 6121 | CATGGCTCAC ACCTGTAATC CACCACTTGG GCAGGCCAAG GTGCTAGGAT CACTTGAGCC |
| 6181 | CAGGAGTTTG AGACCAGCCT GGGCAACACA GTGAGACCCG ATCTCTACAA AAAAAATTTT |
| 6241 | AAAATTAGCC TGGTGTGGTG GCCGGCACCT GTAATCCCAG CTACTTGGAA GGCTGAGGTG |
| 6301 | CGAGGATCAC TTGAGCCCAG GAGGTTGAGG CTGCAGTGAG CCATGATCAT GCCACTGCAC |
| 6361 | TCAGCCTGGG CTACAGAGTG AGACCCTGTC TCAAAAAAAA AAAAGAAAAA GCATGTTGCT |
| 6421 | GTGGGCTTCC TAGAGAATAT GCTGACTGTA GCACATCATC ACCCCAAATG TGCTTTCCTA |
| 6481 | GACCTATGCT TCCTCTCCTT AAAATACTTG AAATCTTTAG TCACTTACCA AGTTAACCCA |
| 6541 | TTATATTGGT GCTTGAATTT ATAAAATACA TCCACATGGT TTGTTAAAAT CATGACGTAG |
| 6601 | GCAGAATAGG ATTTTTATCC TGTTGGCATC TATTTGTTAA AATGTTTTCA CATCTTGATC |
| 6661 | CCTTCCTAGG TAGTAGTTAG TTGCGTACTG TTCTTTGATA AAAATCATAC CCATAACATC |
| 6721 | CTAAAGGACA TAGGGTGCCT GGAGGGGAAT GAAAACGAGC CACGTGGGAT ATGTAGCCTG |
| 6781 | GTTTTCAGGG AGATGTTGAT GTTTTTTTGC TTTTGTTACT TTAATGATAA ACCTGTCTGT |
| 6841 | TGATGCCTGG TCTCATGATG TCATGTCACA AGGCCCTGTG ATGTTACTCC CCCATGTGAA |
| 6901 | TTTCCCACAA TGAAGGCTGC TCTTTCTTTT CTGTTTCACT CTCTTAGATC ACCGGCGTAA |
| 6961 | TCAACCCAGC GTTGGACAAA TACTTTCCGT CAGACTCTGG AGTGAGAATC ATAGCTGAGC |
| 7021 | CCGGCAGATA CTATGTTGCA TCAGCTTTCA CGCTTGCAGT TAATATCATT GCCAAGAAAA |
| 7081 | TTGTATTAAA GGAACAGACG GCCTCTGATG GTATGTATAA AGGACGAATC ACTTCATGTA |
| 7141 | TAACTGAAAG CTGATGCAAA AAGTCATTAA GATTGTTGAT CTGCCTTTCT AGACGAACAT |
| 7201 | GACTCGAGTG AGCAGACCTT TATGTATTAT GTGAATGATG GCGTCTATGG ATCATTTAAT |
| 7261 | TGCATACTCT ATGACCACGC ACATGTAAAG CCCCTTCTGC AAAAGGTAAT TTCTGAGCAT |
| 7321 | ACTGTATAAA ACAATTAAGA GGACTGGTCA CAACACCTGT AATTAACTAC TACTTCCTCT |
| 7381 | CTCCGTCTCT TTATATAGAG ACCTAAACCA GATGAGAAGT ATTATTCATC CAGCATATGG |
| 7441 | GGACCAACAT GTGATGCCCT CGATCGGATT GTTGAGCGCT CTGACCTGCC TCAAATGCAT |
| 7501 | GTGGGTGATT GGATGCTCTE TGAAAACATG GGCGCTTACA CTGTTGCTGC TGCCTCTACG |
| 7561 | TTCAATGGCT TGCAGAGGGC GACCATGTAC TATGTGATGT CAGGGCCTGC GTGGTAAGTA |
| 7621 | AGCCATGCAT GTTGATGGTG CTGCCAAGAA TAGGCACCTT CTTGGATGTC TGCTTCTTGT |
| 7681 | CTAGACGAAT AAGAAATTGT CTTGCCTAAG ATTAAATATA TATGGATATT TTTCCTAAGA |
| 7741 | AAAGTTTTAG AAAAGACTGA TGAGTGTATT TCTATGTAAT TGCAATATAT TTAAGTTCAT |
| 7801 | GCCATGTGTC TTGTGGTTTC CTTATTACCA AAACGGTGAC TGAAGAAACG CTTGCTTTAG |
| 7861 | AAATACATTG AATTGGCCAG GTGTGCTGGC TCACACCTGA AATCACAACA CATTGGGAGG |
| 7921 | CCAAGGCAGA AGGATCACTT GAGCCCAGGA GTTCGAGCCT GGGCAACATA GTGAGACCCT |
| 7981 | GTCTCTACAA AAAATTAAAA AATTAGTTGG CCATGGTAGT GGGCGCCTGT AGTCCCAGCT |
| 8041 | GCTTGGCTAA GGTGAGAGGT TTGCTTGAGC CTGGGAGGTT GAGGCTGCGG TGAGCTATGA |
| 8101 | TAGCACCATT GTATTCCAGC CTGAGTAACA GAGAAAGACC CTGTCTCAGA AAAAAAAAAA |
| 8161 | ATACATTGAA TTGTTTCCTG ATGGGAAGTA AATACTCTCA TGCCCAGTTA GGAGTGAGTC |
| 8221 | AGGGTTTTTA ATATGCCACT TTTTCTTTCT CAGGCAACTC ATGCAGCAAT TCCAGAACCC |
| 8281 | CGACTTCCCA CCCGAAGTAG AGGAACAGGA TGCCAGCACC CTGCCTGTGT CTTGTGCCTG |
| 8341 | GGAGAGTGGG ATGAAACGCC ACAGAGCAGC CTGTGCTTCG GCTAGTATTA ATGTGTAGAT |
| 8401 | AGCACTCTGG TAGCTGTTAA CTGCAAGTTT AGCTTGAATT AAGGGATTTG GGGGGACCAT |
| 8461 | GTAACTTAAT TACTGCTAGT TTTGAAATGT CTTTGTAAGA GTAGGGTCGC CATGATGCAG |
| 8521 | CCATATGGAA GACTAGGATA TGGGTCACAC TTATCTGTGT TCCTATGGAA ACTATTTGAA |
| 8581 | TATTTGTTTT ATATGGATTT TTATTCACTC TTCAGACACG CTACTCAAGA GTGCCCCTCA |
| 8641 | GCTGCTGAAC AAGCATTTGT AGCTTGTACA ATGGCAGAAT GGGCCAAAAG CTTAGTGTTG |
| 8701 | TGACCTGTTT TTAAAATAAA GTATCTTGAA ATAATTAGGC ATTGGGACGT TTTTATGGTG |
| 8761 | TGTTCATTCC AGACAGTTCA CGAATCCCGT ATAGCTCGCT CTGATTCTCA GAGAACAATG |
| 8821 | AGTGGGTCCA CCCACACACA GGTAGGAGGA CAGGTGAGAC GGAAGCCCCA TCCTCCCATG |
| 8881 | TGGACGGTGC ACATCTGCTC AGCCCACCCC ACATGTCCAG AGTTGGCTGC AAACTCCTTG |
| 8941 | TCCAGAGCCT CTGGTGGTGG GACCTACTTA AGTCTGACGG ACCTGTCCTG TCCAGGCCAG |
| 9001 | TGCCCAGGGA AGGTGTGGGA GGCCCTTTGA GCCTGGCCTG CAG |

GENBANK ID: X57522
DEFINITION H. SAPIENS RING4 CDNA.
VERSION X57522.1 GI:36060
CDS 31..2457
/CODON_START=1

| | |
|---|---|
| 1 | GCGGCCGCTT TCGATTTCGC TTTCCCCTAA ATGGCTGAGC TTCTCGCCAG CGCAGGATCA |
| 61 | GCCTGTTCCT GGGACTTTCC GAGAGCCCCG CCCTCGTTCC CTCCCCCAGC CGCCAGTAGG |
| 121 | GGAGGACTCG GCGGTACCCG GAGCTTCAGG CCCCACCGGG GCGCGGAGAG TCCCAGACCC |
| 181 | GGCCGGGACC GGGACGGCGT CCGAGTGCCA ATGGCTAGCT CTAGGTGTCC CGCTCCCCGC |
| 241 | GGGTGCCGCT GCCTCCCCGG AGCTTCTCTC GCATGGCTGG GGACAGTACT GCTACTTCTC |
| 301 | GCCGACTGGG TGCTGCTCCG GACCGCGCTG CCCCGCATAT TCTCCCTGCT GGTGCCCACC |
| 361 | GCGCTGCCAC TGCTCCGGGT CTGGGCGGTG GGCCTGAGCC GCTGGGCCGT GCTCTGGCTG |
| 421 | GGGGCCTGCG GGGTCCTCAG GGCAACGGTT GGCTCCAAGA GCGAAAACGC AGGTGCCCAG |
| 481 | GGCTGGCTGG CTGCTTTGAA GCCATTAGCT GCGGCACTGG GCTTGGCCCT GCCGGGACTT |
| 541 | GCCTTGTTCC GAGAGCTGAT CTCATGGGGA GCCCCCGGGT CCGCGGATAG CACCAGGCTA |
| 601 | CTGCACTGGG GAAGTCACCC TACCGCCTTC GTTGTCAGTT ATGCAGCGGC ACTGCCCGCA |
| 661 | GCAGCCCTGT GGCACAAACT CGGGAGCCTC TGGGTGCCCG GCGGTCAGGG CGGCTCTGGA |
| 721 | AACCCTGTGC GTCGGCTTCT AGGCTGCCTG GGCTCGGAGA CGCGCCGCCT CTCGCTGTTC |
| 781 | CTGGTCCTGG TGGTCCTCTC CTCTCTTGGG GAGATGGCCA TTCCATTCTT TACGGGCCGC |
| 841 | CTCACTGACT GGATTCTACA AGATGGCTCA GCCGATACCT TCACTCGAAA CTTAACTCTC |
| 901 | ATGTCCATTC TCACCATAGC CAGTGCAGTG CTGGAGTTCG TGGGTGACGG GATCTATAAC |
| 961 | AACACCATGG GCCACGTGCA CAGCCACTTG CAGGGAGAGG TGTTTGGGGC TGTCCTGCGC |
| 1021 | CAGGAGACGG AGTTTTTCCA ACAGAACCAG ACAGGTAACA TCATGTCTCG GGTAACAGAG |
| 1081 | GACACGTCCA CCCTGAGTGA TTCTCTGAGT GAGAATCTGA GCTTATTTCT GTGGTACCTG |
| 1141 | GTGCGAGGCC TATGTCTCTT GGGGATCATG CTCTGGGGAT CAGTGTCCCT CACCATGGTC |
| 1201 | ACCCTGATCA CCCTGCCTCT GCTTTTCCTT CTGCCCAAGA AGGTGGGAAA ATGGTACCAG |
| 1261 | TTGCTGGAAG TGCAGGTGCG GGAATCTCTG GCAAAGTCCA GCCAGGTGGC CATTGAGGCT |
| 1321 | CTGTCGGCCA TGCCTACAGT TCGAAGCTTT GCCAACGAGG AGGGCGAAGC CCAGAAGTTT |
| 1381 | AGGGAAAAGC TGCAAGAAAT AAAGACACTC AACCAGAAGG AGGCTGTGGC CTATGCAGTC |
| 1441 | AACTCCTGGA CCACTAGTAT TTCAGGTATG CTGCTGAAAG TGGGAATCCT CTACATTGGT |
| 1501 | GGGCAGCTGG TGACCAGTGG GGCTGTAAGC ACTCCGAACC TTCTCACATT TCTTCTCTAC |
| 1561 | CAGATCCAGT TCACCCAGGC TGTGGAGGTA CTGCTCTCCA TCTACCCCAG AGTACAGAAG |
| 1621 | GCTGTGGGCT CCTCAGAGAA AATATTTGAG TACCTGGACC GCACCCCTCG CTGCCCACCC |
| 1681 | AGTGGTCTGT TGACTCCCTT ACACTTGGAG GGCCTTGTCC AGTTCCAAGA TGTCTCCTTT |
| 1741 | GCCTACCCAA ACCGCCCAGA TGTCTTAGTG CTACAGGGGC TCACATTCAC CCTACGCCCT |
| 1801 | GGCGAGGTGA CGGCGCTGGT GCGACCCAAT GGGTCTGGGA AGAGCACAGT CGCTGCCCTG |
| 1861 | CTGCACAATC TGTACCAGCC CACCGGGCGA CAGCTGCTGT TGGATGGGAA GCCCCTTCCC |
| 1921 | CAATATGAGC ACCGCTACCT GCACAGGCAG GTGGCTGCAG TGGGACAAGA GCCACAGGTA |
| 1981 | TTTGGAAGAA GTCTTCAAGA AAATATTGCC TATGGCCTGA CCCAGAAGCC AACTATGGAG |
| 2041 | GAAATCACAG CTGCTGCAGT AAACTCTGGG GCCCATACTT TCATCTCTGG ACTCCCTCAG |
| 2101 | GGCTATGACA CAGAGGTAGA CGAGGCTGGG AGCCAGCTGT CAGGGGCTCA GCGACAGGCA |
| 2161 | GTGGCGTTGG CCCGAGCATT GATCCGGAAA CCCTGTGTAC TTATCCTGGA TGATGCCACC |
| 2221 | AGTGCCCTGG ATGCAAACAG CCAGTTACAG GTGGAGCAGC TCCTGTACGA AAGCCCTGAG |
| 2281 | CGGTACTCCC GCTCAGTGCT TCTCATCACC CAGCACCTCA GCCTGGTGGA GCAGGCTGAC |
| 2341 | CACATCCTCT TTCTGGAAGG AGGCGCTATC CGGGAGCGGG GAACCCACCA GCAGCTCATG |
| 2401 | GAGAAAAAGG GGTGCTACTG GGCCATGGTG CAGGCTCCTG CAGATGCTCC AGAATCAAAG |
| 2461 | CCTTCTCAGA CCTGCGCACT CCATCTCCCT CCCTTTTCTT CTCTCTGTGG TGGAGAACCA |
| 2521 | CAGCTGCAGA GTAGCAGCTC CCTCCAGGAT GAGTTACTTG AAATTTGCCT TGAGTGTGTT |
| 2581 | ACCTCCTTTC CAAGCTCCTC GTGATAATGC AGACTTCCTG GAGTACAAAC ACAGGATTTG |
| 2641 | TAATTCCTAC TGTAACGGAG TTTAGAGCCA GGGCTGATGC TTTGGTGTGG CCAGCACTCT |
| 2701 | GAAACTGAGA AATGTTCAGA ATGTACGGAA AGATGATCAC CTATTTTCAA CATAACTGAA |
| 2761 | GGCATATGCT GGCCCATAAA CACCCTGTAG GTTCTTGATA TTTATAATAA AATTGGTGTT |
| 2821 | TTGT |

GENBANK ID: D00017.1
DEFINITION HOMO SAPIENS MRNA FOR LIPOCORTIN II, COMPLETE CDS.
VERSION D00017.1 GI:219909
CDS 50..1069
/CODON_START=1

| | |
|---|---|
| 1 | CATTTGGGGA CGCTCTCAGC TCTCGGCGCA CGGCCCAGCT TCCTTCAAAA TGTCTACTGT |
| 61 | TCACGAAATC CTGTGCAAGC TCAGCTTGGA GGGTGATCAC TCTACACCCC CAAGTGCATA |
| 121 | TGCGTCTGTC AAAGCCTATA CTAACTTTGA TGCTGCGCGG GATGCTTTGA ACATTGAAAC |
| 181 | AGCCATCAAC ACCAAACGTG TGGATGAGGT CACCATTGTC AACATTTTGA CCAACCGCAG |
| 241 | CAATGCACAG AGACAGGATA TTGCCTTCGC CTACCAGAGA AGGACCAAAA AGGAACTTGC |
| 301 | ATCAGCACTG AAGTCAGCCT TATCTGGCCA CCTGGAGACG GTGATTTTGG GCCTATTGAA |
| 361 | GACACCTGCT CAGTATGACG CTTCTGAGCT AAAAGCTTCC ATGAAGGGGC TGGGAACCGA |
| 421 | CGAGGACTCT CTCATTGAGA TCATCTGCTC CAGAACCAAC CAGGAGCTGC AGGAAATTAA |
| 481 | CAGAGTCTAC AAGGAAATGT ACAAGACTGA TCTGGAGAAG GACATTATTT CGGACACATC |
| 541 | TGGTGACTTC CGCAAGCTGA TGGTTGCCCT GGCAAAGGGT AGAAGAGCAG AGCATGGCTC |
| 601 | TGTCATTGAT TATGAACTGA TTGACCAAGA TGCTCGGGAT CTCTATGACG CTGGAGTGAA |
| 661 | GAGGAAAGGA ACTGATGTTC CCAAGTGGAT CAGCATCATG ACCGAGGGGA GCGTGCCCCA |
| 721 | CCTCCAGAAA GTATTTGATA GGTACAAGAG TTACAGCCCT TATGACATGT TGGAAAGCAT |
| 781 | CAGGAAAGAG GTTAAAGGAG ACCTGGAAAA TGCTTTCCTG AACCTGGTTC AGTGCATTCA |
| 841 | GAACAAGCCC CTGTATTTTG CTGATCGGCT GTATGACTCC ATGAAGGGCA AGGGGACGCG |
| 901 | AGATAAGGTC CTGATCAGAA TCATGGTCTC CCGCAGTGAA GTGGACATGT TGAAAATTAG |
| 961 | GTCTGAATTC AAGAGAPAGT ACGGCAAGTC CCTGTACTAT TATATGCAGG AAGACACTAA |
| 1021 | GGGCGACTAC CAGAAAGCGC TGCTGTACCT GTGTGGTGGA GATGACTGAA GCCCGACACG |
| 1081 | GCCTGAGCGT CCAGAAATGG TGCTCACCAT GCTTCCAGCT AACAGGTCTA GAAAACCAGC |
| 1141 | TTGCGAATAA CAGTCCCCGT GGCCATCCCT GTGAGGGTGA CGTTAGCATT ACCCCCAACC |
| 1201 | TCATTTTAGT TGCCTAAGCA TTGCCTGGCC TTCCTGTCTA GTCTCTCCTG TAAGCCAAAG |
| 1261 | AAATGAACAT TCCAAGGAGT TGGAAGTGAA GTCTATGATG TGAAACACTT TGCCTCCTGT |
| 1321 | GTACTGTGTC ATAAACAGAT GAATAAACTG AATTTGTACT TT |

GENBANK ID: M10277.1
DNA LINEAR
DEFINITION HUMAN CYTOPLASMIC BETA-ACTIN GENE, COMPLETE CDS.
VERSION M10277.1 GI:177967

| | |
|---|---|
| 1 | GCCCAGCACC CCAAGGCGGC CAACGCCAAA ACTCTCCCTC CTCCTCTTCC TCAATCTCGC |
| 61 | TCTCGCTCTT TTTTTTTTTC GCAAAAGGAG GGGAGAGGGG GTAAAAAAAT GCTGCACTGT |
| 121 | GCGGCGAAGC CGGTGAGTGA GCGGCGCGGG GCCAATCAGC GTGCGCCGTT CCGAAAGTTG |
| 181 | CCTTTTATGG CTCGAGCGGC CGCGGCGGCG CCCTATAAAA CCCAGCGGCG CGACGCGCCA |
| 241 | CCACCGCCGA GACCGCGTCC GCCCGCGAGC ACAGAGCCTC GCCTTTGCCG ATCCGCCGCC |
| 301 | CGTCCACACC CGCCGCCAGG TAAGCCCGGC CAGCCGACCG GGGCATGCGG CCGCGGCCCT |
| 361 | TCGCCCGTGC AGAGCCGCCG TCTGGGCCGC AGCGGGGGGC GCATGGGGCG GAACCGGACC |
| 421 | GCCGTGGGGG GCGCGGGAGA AGCCCCTGGG CCTCCGGAGA TGGGGGACAC CCCACGCCAG |
| 481 | TTCGCAGGCG CGAGCCCGCG CTCGGGCGGG CGCGCTCCGG GCGTGCCGCT CTCGGGGCGG |
| 541 | GGGCAACCGG CGGCGTCTTT GTCTGAGCCG GCCTCTTGCC AATGGGGATC GCACCCTGGG |
| 601 | CGCGGCGTAG CCCCCGTCAG GCCCGGTGGG GGCTCGGGCG CCATGCGCGT GCGCGCTGGT |
| 661 | CCTTTGGGCG CTAACTGCCT GCGCGCTGGG AATTGCCGCT AATTGCCCGT GCGCGCTGCG |
| 721 | ACTCAATGCC GCTAATCGCG CGTCCGTTCT GGGGCCCGGG CCCTTGCGCC ACTTCCTGCC |
| 781 | CGAGCCGCTG GCGCCCGAGG GTGTGGCCGC TGCGTGCGCG CCCGCGACCC GGTCGCTGTT |
| 841 | TCAACCGGGC GGAGGCCGGG CTCCCGCCCC GTTCGGAGGG GGTTGGGGCC TGGCTTCCTG |
| 901 | CCGCCCGCCG CGGGCACGCC TCCGACCAGT GTTTGCCTTT TATGGTAATA ACGCGGCCGG |
| 961 | CCCCCCTTCC TTTGTCCCCA ATCTCGCCGC GCGCCGGCGC CCCCTGGCGG CCTAAGGACT |
| 1021 | CGGCGCGCCG GAAGTGGCCA GGGCGGGGGC GACTTCGGCT CACAGCGCGC CCGGCTATTC |
| 1081 | TCGCAGCTCA CCATGGATGA TGATATCGCC GCGCTCGTCG TCGACAACGG CTCCGGCATG |
| 1141 | TGCAAGGCCG GCTTCCCGGG CCACGATGCC CCCCGGGCCG TCTTCCCCTC CATCGTGGGG |
| 1201 | CGCCCCAGGC ACCAGGTAGG GGAGCTGGCT GGGTGGGGCA GCCCCGGGAG CCGGCGGGAG |
| 1261 | GCAAGGGCGC TTTCTCTGCA CAGGAGGCTG CCGGTTTCCG GGGTGGGCTG CGCCCGTGCT |
| 1321 | CAGGGCTTCT TGTCCTTTCC TTCCCAGGGC GTGATGGTGG GCATGGGTCA GAAGGATTCC |
| 1381 | TATGTGGGCG ACGAGGCCCA GAGCAAGAGA GGCATCCTCA CCCTGAAGTA CCCCATCGAG |
| 1441 | CACGCCATGG TCACCAACTG GGACGACATG GAGAAAATCT GGCACCACAC CTTCTACAAT |
| 1501 | GAGCTGCGTG TGGCTCCCGA GGAGCACCCC GTGCTGCTGA CCGAGGCCCC CCTGAACCCC |
| 1561 | AAGGCCAACC GCGAGAAGAT GACCCAGGTG AGTGGCCCGC TACCTCTTCT GGTGGCCGCC |
| 1621 | TCCCTCCTTC CTGGCCTCCC GGAGCTGCGC CCTTTCTCAC TGGTTCTCTC TTCTGCCGTT |
| 1681 | TTCCGTAGGA CTCTCTTCTC TGACCTGAGT CTCCTTTGGA ACTCTGCAGG TTCTATTTGC |
| 1741 | TTTTTCCCAG ATGAGCTCTT TTTCTGGTGT TTGTCTCTCT GACTAGGTGT CTGAGACAGT |
| 1801 | GTTGTGGGTG TAGGTACTAA CACTGGCTCG TGTGACAAGG CCATGAGGCT GGTGTAAAGC |
| 1861 | GGCCTTGGAG TGTGTATTAA GTAGGCGCAC AGTAGGTCTG AACAGACTCC CCATCCCAAG |
| 1921 | ACCCCAGCAC ACTTAGCCGT GTTCTTTGCA CTTTCTGCAT GTCCCCCGTC TGGCCTGGCT |
| 1981 | GTCCCCAGTG GCTTCCCCAG TGTGACATGG TGCATCTCTG CCTTACAGAT CATGTTTGAG |
| 2041 | ACCTTCAACA CCCCAGCCAT GTACGTTGCT ATCCAGGCTG TGCTATCCCT GTACGCCTCT |
| 2101 | GGCCGTACCA CTGGCATCGT GATGGACTCC GGTGACGGGG TCACCCACAC TGTGCCCATC |
| 2161 | TACGAGGGGT ATGCCCTCCC CCATGCCATC CTGCGTCTGG ACCTGGCTGG CCGGGACCTG |
| 2221 | ACTGACTACC TCATGAAGAT CCTCACCGAG CGCGGCTACA GCTTCACCAC CACGGCCGAG |
| 2281 | CGGGAAATCG TGCGTGACAT TAAGGAGAAG CTGTGCTACG TCGCCCTGGA CTTCGAGCAA |
| 2341 | GAGATGGCCA CGGCTGCTTC CAGCTCCTCC CTGGAGAAGA GCTACGAGCT GCCTGACGGC |
| 2401 | CAGGTCATCA CCATTGGCAA TGAGCGGTTC CGCTGCCCTG AGGCACTCTT CCAGCCTTCC |
| 2461 | TTCCTGGGTG AGTGGAGACT GTCTCCCGGC TCTGCCTGAC ATGAGGGTTA CCCCTCGGGG |
| 2521 | CTGTGCTGTG GAAGCTAAGT CCTGCCCTCA TTTCCCTCTC AGGCATGGAG TCCTGTGGCA |
| 2581 | TCCACGAAAC TACCTTCAAC TCCATCATGA AGTGTGACGT GGACATCCGC AAAGACCTGT |
| 2641 | ACGCCAACAC AGTGCTGTCT GGCGGCACCA CCATGTACCC TGGCATTGCC GACAGGATGC |
| 2701 | AGAAGGAGAT CACTGCCCTG GCACCCAGCA CAATGAAGAT CAAGGTGGGT GTCTTTCCTG |
| 2761 | CCTGAGCTGA CCTGGGCAGG TCAGCTGTGG GGTCCTGTGG TGTGTGGGGA GCTGTCACAT |
| 2821 | CCAGGGTCCT CACTGCCTGT CCCCTTCCCT CCTCAGATCA TTGCTCCTCC TGAGCGCAAG |
| 2881 | TACTCCGTGT GGATCGGCGG CTCCATCCTG GCCTCGCTGT CCACCTTCCA GCAGATGTGG |
| 2941 | ATCAGCAAGC AGGAGTATGA CGAGTCCGGC CCCTCCATCG TCCACCGCAA ATGCTTCTAG |
| 3001 | GCGGACTATG ACTTAGTTGC GTTACACCCT TTCTTGACAA AACCTAACTT GCGCAGAAAA |
| 3061 | CAAGATGAGA TTGGCATGGC TTTATTTGTT TTTTTTGTTT TGTTTTGGTT TTTTTTTTTT |
| 3121 | TTTTGGCTTG ACTCAGGATT TAAAAACTGG AACGGTGAAG GTGACAGCAG TCGGTTGGAG |
| 3181 | CGAGCATCCC CCAAAGTTCA CAATGTGGCC GAGGACTTTG ATTGCATTGT TGTTTTTTTA |
| 3241 | ATAGTCATTC CAAATATGAG ATGCATTGTT ACAGGAAGTC CCTTGCCATC CTAAAAGCCA |
| 3301 | CCCCACTTCT CTCTAAGGAG AATGGCCCAG TCCTCTCCCA AGTCCACACA GGGGAGGTGA |
| 3361 | TAGCATTGCT TTCGTGTAAA TTATGTAATG CAAAATTTTT TTAATCTTCG CCTTAATACT |
| 3421 | TTTTTATTTT GTTTTATTTT GAATGATGAG CCTTCGTGCC CCCCCTTCCC CCTTTTTGTC |
| 3481 | CCCCAACTTG AGATGTATGA AGGCTTTTGG TCTCCCTGGG AGTGGGTGGA GGCAGCCAGG |
| 3541 | GCTTACCTGT ACACTGACTT GAGACCAGTT GAATAAAAGT GCACACCTTA AAAATGAGGC |
| 3601 | CAAGTGTGAC TTTGTGGTGT GGCTGGGTTG GGGGCAGCAG AGGGTG |

GENBANK ID: XM_042788.1
DEFINITION HOMO SAPIENS ALDOLASE B, FRUCTOSE-BISPHOSPHATE (ALDOB), MRNA.
VERSION XM_042788.1 GI:14738248
CDS 126..1220
/CODON_START=1

| | |
|---|---|
| 1 | AAAAACATGA TGAGAAGTCT ATAAAAATTG TGTGCTACCA AAGATCTGTC TTATTTGGCA |
| 61 | GCTGCTGCCT CACCCACAGC TTTTGATATC TAGGAGGACT CTTCTCTCCC AAACTACCTG |
| 121 | TCACCATGGC CCACCGATTT CCAGCCCTCA CCCAGGAGCA GAAGAAGGAG CTCTCAGAAA |
| 181 | TTGCCCAGAG CATTGTTGCC AATGGAAAGG GGATCCTGGC TGCAGATGAA TCTGTAGGTA |
| 241 | CCATGGGGAA CCGCCTGCAG AGGATCAAGG TGGAAAACAC TGAAGAGAAC CGCCGGCAGT |
| 301 | TCCGAGAAAT CCTCTTCTCT GTGGACACTT CCATCAACCA GAGCATCGGG GGTGTCATCC |
| 361 | TTTTCCACGA GACCCTCTAC CAGAAAGACA GCCAGGGAAA GCTGTTCACA AACATCCTCA |
| 421 | AGGAAAAGGG GATCGTGGAG CGAATCAAGT TAGACCAAGG AGGTGCTCCT CTTGCAGGAA |
| 481 | CAAACAAAGA AACCACCATT CAAGGGCTTG ATGGCCTCTC AGAGCGCTGT GCTCACTACA |
| 541 | AGAAAGATGG TGTTGACTTT GGGAAGTGGC GTGCTGTGCT GAGGATTGCC GACCAGTGTC |
| 601 | CATCCAGCCT CGCTATCCAG CAAAACGCCA ACGCCCTGGC TCGCTACGCC AGCATCTGTC |
| 661 | AGCAGAATGG ACTGGTACCT ATTGTTGAAC CAGAGGTAAT TCCTGATGGA GACCATGACC |
| 721 | TGGAACACTG CCAGTATGTT ACTGAGAAGG TCCTGGCTGC TGTCTACAAG GCCCTGAATG |
| 781 | ACCATCATGT TTACCTGGAG GGCACCCTGC TAAAGCCCAA CATGGTGACT GCTGGACATG |
| 841 | CCTGCACCAA GAAGTATACT CCAGAACAAG TAGGTATGGC CACCGTAACA GCTCTCCACC |
| 901 | GTACTGTTCC TGCAGCTGTT CCTGGCATCT GCTTTTTGTC TGGTGGCATG AGTGAAGAGG |
| 961 | ATGCCACTCT CAACCTCAAT GCTATCAACC TTTGCCCTCT ACCAAAGCCC TGGAAACTAA |
| 1021 | GTTTCTCTTA TGGACGGGCC CTGCAGGCCA GTGCACTGGC TGCCTGGGGT GGCAAGGCTG |
| 1081 | CAAACAAGGA GGCAACCCAG GAGGCTTTTA TGAAGCGGGC CATGGCTAAC TGCCAGGCGG |
| 1141 | CCAAAGGACA GTATGTTCAC ACGGGTTCTT CTGGCGCTGC TTCCACCCAG TCCCTCTTCA |
| 1201 | CAGGCTGCTA TACCTACTAC GGTCCAATGC CCGCCAGCCT ACCTCCAGTG CTTCTACTAG |
| 1261 | GAGGGCTGAA AGGGAGCAAC TTTTCCTCCA ATCCTGGAAA TTCGACACAA TTAGATTTGA |
| 1321 | ACTGCTGGAA ATACAACACA TGTTAAATCT TAAGTACAAG GCGGAAAAAA TAAATCAGTT |
| 1381 | ATTGAAACAT AAAAATGAAT ACCAAGGACC TGATCAAATT TCACACAGCA GTTTCCTTGC |
| 1441 | AACACTTTCA GCTCCCCATG CTCCAGAATA CCCACCCAAG AAAATAATAG GCTTTAAAAC |
| 1501 | AATATCGGCT CCTCATCCAA AGAACAACTG CTGATTGAAA CACCTCATTA GCTGAGTGTA |
| 1561 | GAGAAGTGCA TCTTATGAAA CAGTCTTAGC AGTGGTAGGT TGGGAAGGAG ATAGCTCCAA |
| 1621 | CCAAAAAAGA AATAAATATT CTATAAACCT TC |

GENBANK ID: NM_005317.2
DEFINITION HOMO SAPIENS GRANZYME N (LYMPHOCYTE MET-ASE 1) (GZMM), MRNA.
VERSION NM_005317.2 GI:7108347
CDS 46..819
/CODON_START=1

| | |
|---|---|
| 1 | GGCTCGGGGC CGGGGCCAGC ACCCACACTG GGTCTCCACA GCGGCATGGA GGCCTGCGTG |
| 61 | TCTTCACTGC TGGTGCTGGC CCTGGGGGCC CTGTCAGTAG GCAGCTCCTT TGGGACCCAG |
| 121 | ATCATCGGGG GCCGGGAGGT GATCCCCCAC TCGCGCCCGT ACATGGCCTC ACTGCAGAGA |
| 181 | AATGGCTCCC ACCTGTGCGG GGGTGTCCTG GTGCACCCAA AGTGGGTGCT GACGGCTGCC |
| 241 | CACTGCCTGG CCCAGCGGAT GGCCCAGCTG AGGCTGGTGC TGGGGCTCCA CACGCTGGAC |
| 301 | AGCCCCGGTC TCACCTTCCA CATCAAGGCA GCCATCCAGC ACCGTGGCTA CAAGCCCGTC |
| 361 | CCTGCCCTGG AGAACGACCT CGCGCTGCTT CAGCTGGACG GGAAAGTGAA GCCCAGCCGG |
| 421 | ACCATCCGGC CGTTGGCCCT GCCCAGTAAG CGCCAGGTGG TGGCAGCAGG GACTCGGTGC |
| 481 | AGGATGCCGG GCTGGGGGCT GACCGACCAG GGCGGGCGCC TGTCCCGGGT GCTGCGGGAG |
| 541 | CTGGACCTCC AAGTGCTGGA CACCCGCATG TGTAACAACA GCCGCTTCTG GAACGGCAGC |
| 601 | CTCTCCCCCA GCATGGTCTG CCTGGCGGGC GACTCCAAGG ACCAGGCTCC CTGCAAGGGT |
| 661 | GACTCGGGCG GGCCCCTGGT GTGTGGCAAA GGCCGGGTGT TGGCCGGAGT CCTGTCCTTC |
| 721 | AGCTCCAGGG TCTGCACTGA CATCTTCAAG CCTCCCGTGG CCACCGCTGT GGCGCCTTAC |
| 781 | GTGTCCTGGA TCAGGAAGGT CACCGGCCGA TCGGCCTGAT GCCCTGGGGT GATGGGGACC |
| 841 | CCCTCGCTGT CTCCACAGGA CCCTTCCCCT CCAGGGGTGC AGTGGGGTGG GTGAGGACGG |
| 901 | GTGGGAGGGA CAGGGAGGGA CCAATAAATC ATAATGAAGA AACGCTC |

GENBANK ID: XM_003595.2
DEFINITION HOMO SAPIENS GLOTAMYL AMINOPEPTIDASE (ANINOPEPTIDASE A)
(ENPEP) ,MRNA.
VERSION XM_003595.2 GI:13647140
CDS 1401..2957
/CODON_START=1

| | |
|---|---|
| 1 | TCCAATTTAA AAAGGAAGTC TGCTGACGTT AGTTAGTTAA ATTTAACATC TTTTTATGTG |
| 61 | TAACACTTGA CTTTGGAAGC AAAAATGAAC TTTGCGGAGA GAGAGGGCTC TAAGAGATAC |
| 121 | TGCATTCAAA CGAAACATGT GGCCATTCTC TGTGCGGTGG TGGTGGGTGT AGGATTAATA |
| 181 | GTGGGACTTG CCGTGGGCTT GACCAGATGG TGTGACTCCA GCGGGGACGG CGGGCCGGGC |
| 241 | ACTGCGCCAG CTCCTTCCCA CCTGCCTTCT TCCACGGCCA GCCCCTCAGG TCCTCCTGCC |
| 301 | CAGGACCAGG ACATCTGCCC GGCCAGTGAG GATGAGAGCG GACAGTGGAA AAACTTTCGA |
| 361 | CTGCCGGACT TCGTCAACCC AGTCCACTAC GACCTGCACG TGAAGCCCCT GTTGGAGGAG |
| 421 | GACACGTACA CGGGCACCGT GAGGATGTGC ATCAACCTGA GCGCTGCCAC CCGGTACCTG |
| 481 | TGGCTGCACC TCCGGGAGAC CAGGATGACG CGGCTCCCGG AGCTGAAGAG GCCCTCTGGG |
| 541 | GACCAGGTGC AAGTCCGGAG GTGTTTCGAG TACAAAAAGC AGGAGTACGT GGTGGTCGAG |
| 601 | GCGGAGGAAG AGCTTACCCC CAGCAGTGGA GATGGCCTGT ATCTCCTGAC CATGGAGTTC |
| 661 | GCCGGCTGGC TGAACGGCTC CCTCGAGGGA TTTTATAGAA CCACCTACAC GGAGAACGGA |
| 721 | CAAGTCAACA GCATAGTGGC CACCGATCAT GAACCAACAG ATCCCAGGAA ATCTTTTCCT |
| 781 | TGTTTTGATG AGCCCAACAA AAAGGCAACT TATACAATAT CTATCACCCA TCCCAAAGAA |
| 841 | TACGGACCAC TTTCAAATAT GCCAGTGGCG AAACAACAGT CAGTGGATGA TAAATGGACT |
| 901 | CGAACAACTT TTGAGAAGTC TGTCCCCATG AGCACGTACC TGGTGTGCTT TGCTGTACAT |
| 961 | CAATTTGACT CTGTAAAGAG AATATCAAAT AGTGGAAAAC CTCTTACAAT TTATGTCCAC |
| 1021 | CCAGAGCAAA AGCACACAGC CGAATATGCT GCAAACATAA CTAAAAGTGT GTTTGATTAT |
| 1081 | TTTGAAGAAT ACTTTGCTAT GAATTATTCT CTTCCTAAAT TAGATAAAAT CGCTATTCCA |
| 1141 | GATTTTGGCA CTGGTGCCAT GGAGAACTGG CGACTCATCA CGTACAGAGA AACGAACCTG |
| 1201 | CTTTATGACC CTAAGGAATC AGCCTCATCA AACCAACAGA GGGTGGCCAC TGTGGTTGCC |
| 1261 | CATGAACTTG TGCATCAGTG GTTTCGAAAT ATTGTGACCA TGGACTGGTG GGAAGACTTG |
| 1321 | TGCCTAAATG AAGGATTTGC TTCTTTCTTT GAGTTTCTGG GAGTAAACCA TGCAGAAACA |
| 1381 | GACTGGCAAA TGGTGACCAA ATGTTACTTG AAGATGTATT ACCTGTTCAA GAGGATGATT |
| 1441 | CTTTGATGTC TTCCCATCCA ATTATTGTGA CTGTGACAAC CCCTGATGAA ATAACATCTC |
| 1501 | TTTTTGATGG AATATCCTAT AGCAAGGGAT CTTCTATTTT GAGAATGCTT GAAGACTGGA |
| 1561 | TAAAACCAGA GAATTTTCAA AAAGGATGTC AGATGTACTT GGAAAAATAC CAATTCAAGA |
| 1621 | ATGCAAAAAC TTCTGATTTT TGGGCAGCAC TGGAAGAGGC AAGTAGGCTA CCAGTGAAAG |
| 1681 | AAGTAATGGA CACCTGCACC AGACAGATGG CTTATCCTGT GCTTAACGTG AACGGTGTCA |
| 1741 | AGAACATCAC ACAGAAACGC TTTTTGTTGC ACCCAAGAGC TAACCCTTCT CAGCCCCCTT |
| 1801 | CAGATCTTCG TTATACATGG AATATCCCAG TTAAATGGAC TGAAGATAAT ATAACAAGCA |
| 1861 | GTCTGTTATT TAATAGGTCA GAAAAAGAAG GAATGACTTT GAACTCCTCT AATCCTAGTG |
| 1921 | GAAATGCTTT TCTCAAAATA AACCCACATC ATATTGGGTT TTATCGTGTA AATTATGAAG |
| 1981 | TAGCAACTTG GGACTCGATA CCTACAGCGC TCTCCTTGAA CCACAAGACA TTTTCTTCAG |
| 2041 | CAGATCGTCC AAGTCTTATT GATGATGCTT TTGCCTTGGC AAGAGCTCAA CTTCTACATT |
| 2101 | ATAAGGTGGC TTTGAACTTG ACCAAGTATC TCAAAACGGA AGAGAATTTT TTACCATGGC |
| 2161 | AGAGAGTAAT TTCAGCTGTA ACCTACATCA TTAGCATGTT TGAAGATGAT AAAGAGCTAT |
| 2221 | ATCCTATGAT TGAGGAATAC TTCCAAGGTC AAGTGAAGCC TATTGCAGAT TCTCTGGGAT |
| 2281 | GGAATGATGC TGGAGACCAT GTCACAAAGT TACTCCGTTC CTCCGTGTTA GGGTTTGCGT |
| 2341 | GCAAGATGGG AGACAGAGAA GCCTTGAACA ATGCTTCCTC GTTATTTGAG CAGTGGCTAA |
| 2401 | ATGCCACTGT AAGCCTTCCC GTAAATCTCA GGCTTCTGGT GTATCGGTAT GGGATGCAGA |
| 2461 | ACTCTGGCAA TGAGATTTCA TGGAACTACA CTCTTGAGCA ATACCAGAAA ACTTCATTAG |
| 2521 | CTCAAGAAAA AGAAAAACTG CTGTATGGAT TAGCATCAGT GAAGAACGTT ACTCTTTTGT |
| 2581 | CAAGGTATTT GGATTTGCTC AAGGACACGA ACCTTATTAA AACTCAGGAT GTGTTTACAG |
| 2641 | TCATTCGATA TATCTCATAT AACAGCTATG GGAAGAACAT GGCCTGGAAT TGGATACAAC |
| 2701 | TCAACTGGCA CTATCTAGTC AACAGATATA CACTCAATAA CAGAAACGTT GGCCGAATTG |
| 2761 | TCACAATAGC AGAGCCATTC AACACTGAAC TGCAACTGTG GCAGATGGAG AGCTTTTTTG |
| 2821 | CAAAATATCC ACAAGCTGGA GCAGGAGAAA AACCTAGGGA ACAAGTGCTG GAAACAGTGA |
| 2881 | AAAACAATAT AGAGTGGCTA AAACAACATA GAAACACCAT CAGAGAATGG TTTTTTAATT |
| 2941 | TACTTGAGAG TGGTTAATGT ATTCAAATGT TAGAGTTTAA TTTTGTGAAT CTATTGTTTC |

GENBANK ID: U34683.1
DEFINITION HUMAN GLUTATHIONE SYNTHETASE MRNA, COMPLETE CDS.
VERSION 034683.1 GI:1236349
CDS 41..1465
/CODON_START=1

| | |
|---|---|
| 1 | GGGAGAACCG TTCGCGGAGG AAAGGCGAAC TAGTGTTGGG ATGGCCACCA ACTGGGGGAG |
| 61 | CCTCTTGCAG GATAAACAGC AGCTAGAGGA GCTGGCACGG CAGGCCGTGG ACCGGGCCCT |
| 121 | GGCTGAGGGA GTATTGCTGA GGACCTCACA GGAGCCCACT TCCTCGGAGG TGGTGAGCTA |
| 181 | TGCCCCATTC ACGCTCTTCC CCTCACTGGT CCCCAGTGCC CTGCTGGAGC AAGCCTATGC |
| 241 | TGTGCAGATG GACTTCAACC TGCTAGTGGA TGCTGTCAGC CAGAACGCTG CCTTCCTGGA |
| 301 | GCAAACTCTT TCCAGCACCA TCAAACAGGA TGACTTTACC GCTCGTCTCT TTGACATCCA |
| 361 | CAAGCAAGTC CTAAAAGAGG GCATTGCCCA GACTGTGTTC CTGGGCCTGA ATCGCTCAGA |
| 421 | CTACATGTTC CAGCGCAGCG CAGATGGCTC CCCAGCCCTG AAACAGATCG AAATCAACAC |
| 481 | CATCTCTGCC AGCTTTGGGG GCCTGGCCTC CCGGACCCCA GCTGTGCACC GACATGTTCT |
| 541 | CAGTGTCCTG AGTAAGACCA AAGAAGCTGG CAAGATCCTC TCTAATAATC CCAGCAAGGG |
| 601 | ACTGGCCCTG GGAATTGCCA AAGCCTGGGA GCTCTACGGC TCACCCAATG CTCTGGTGCT |
| 661 | ACTGATTGCT CAAGAGAAGG AAAGAAACAT ATTTGACCAG CGTGCCATAG AGAATGAGCT |
| 721 | ACTGGCCAGG AACATCCATG TGATCCGACG AACATTTGAA GATATCTCTG AAAAGGGGTC |
| 781 | TCTGGACCAA GACCGAAGGC TGTTTGTGGA TGGCCAGGAA ATTGCTGTGG TTTACTTCCG |
| 841 | GGATGGCTAC ATGCCTCGTC AGTACAGTCT ACAGAATTGG GAAGCACGTC TACTGCTGGA |
| 901 | GAGGTCACAT GCTGCCAAGT GCCCAGACAT TGCCACCCAG CTGGCTGGGA CTAAGAAGGT |
| 961 | GCAGCAGGAG CTAAGCAGGC CGGGCATGCT GGAGATGTTG CTCCCTGGCC AGCCTGAGGC |
| 1021 | TGTGGCCCGC CTCCGCGCCA CCTTTGCTGG CCTCTACTCA CTGGATGTGG GTGAAGAAGG |
| 1081 | GGACCAGGCC ATCGCCGAGG CCCTTGCTGC CCCTAGCCGG TTTGTGCTAA AGCCCCAGAG |
| 1141 | AGAGGGTGGA GGTAACAACC TATATGGGGA GGAAATGGTA CAGGCCCTGA AACAGCTGAA |
| 1201 | GCACACTGAG GAGAGGGCCT CCTACATCCT CATGGAGAAG ATCGAACCTG AGCCTTTTGA |
| 1261 | GAATTGCCTG CTACGGCCTG GCAGCCCTGC CCGAGTGGTC CAGTGCATTT CAGAGCTGGG |
| 1321 | CATCTTTGGG GTCTATGTCA GGCAGGAAAA GACACTCGTG ATGAACAAGC ACGTGGGGCA |
| 1381 | TCTACTTCGA ACCAAAGCCA TCGAGCATGC AGATGCTGGT GTGGCACCGG GAGTGGCAGT |
| 1441 | CCTGGACAAC CCATACCCTG TGTGAGGGCA CAACCAGGCC ACGGGACCTT CTATCCTCTG |
| 1501 | TATTTGTCAT TCCTCTCCTA GCCCTCCTGA GGGGTATCCT CCTAAAGACC TCCAAAGTTT |
| 1561 | TTATGGAAGG GTAAATACTG CTACCTTCCC CCAGCTTTCC ATCTGACGAC CAGAAAACTT |
| 1621 | GTGTCTCCCT TACATGACAT CTAGACGCCC CCAAATCCTT CAGATGTGGG TATAGCTCAG |
| 1681 | GCTAAGCTGC TCTGAGGTAA AGGTCCATGA ACCCTGCCCC ACTCCTGTCA GCCCCTCATC |
| 1741 | AGCCTTTTCA CCAGGTTCCA GTCCCTGACT TGGGATAGCA CTCAGTGCTA CCACCAGGGC |
| 1801 | GAGTGGAGGG GCATAGCCTT TCCCTAATTC TGCCTTAAAT AAAACTGCAT TGCTGT |

GENBANK ID: AF035429.1
DNA LINEAR
DEFINITION HOMO SAPIENS CYTOCHEOME OXIDASE SUBUNIT I (001) AND SUBUNIT II
(CCII) PSEUDOGENES, COMPLETE SEQUENCE.
VERSION AF035429.1 GI:2665724

| | |
|---|---|
| 1 | AATATGAAAA TCACCTCGGA GCTGGTAAAA AGAGGCTTAA CCCCTGTCTT TAGATTTACA |
| 61 | GTCCAATGCT TCACTCAGCC ATTTTACCTC ACCCCCACTG ATGTTCGCCG ACCGTTGACT |
| 121 | ATTCTCTACA AACCACAAAG ACATTGGAAC ACTATACCTA TTATTCGGCG CATGAGCTGG |
| 181 | AGTCCTACGC ACAGCTCTAA GCCTCCTTAT TCGAGCCGAA CTGGGCCAGC CAGGCAACCT |
| 241 | TCTAGGTAAC GACCACATCT ACAACGTTAT CGTCACAGCC CATGCATTTG TAATAATCTT |
| 301 | CTTCATAGTA ATACCCATCA TAATCGGAGG CTTTGGCAAC TGACTAGTTC CCCTAATAAT |
| 361 | CGGTCCCCCC GATATGGCGT TTCCCCGCAT AAACAACATA AGCTTCTCAC TCTTACCCCC |
| 421 | CTCTCTCCTA CTCCTGCTTG CATCTCCTAT AGTGGAGGCC GGCGCAGGAA CAGGTTGAAC |
| 481 | AGTCTACCCT CCCTTGGCAG GGAACTACTC CCACCCTGGA GGCTGCGTAG ACCTAACCAT |
| 541 | CTTCTCCTTA CACCTAGCAG GTATCTCCTC TATCTTAGGA GCCATCAATT TCATCACAAC |
| 601 | AATTATTAAT ATAAAACCCC CTGCCATAAC CCAATACCAA ACGCCCCTTT TCGTCTGATC |
| 661 | CGTCCTAATC ACAGCAGTCT TACTTCTCCT ATCTCTCCCA GTCCTAGCCG CTGGCATCAC |
| 721 | TATACTACTA ACAGACCGTA ACCTCAACAC CACCTTCTTC GACCCAGCCG GAGGAGGAGA |
| 781 | CCCCATTCTA TACCAACACC TATTCTGATT TTTCGGTCAC CCTGAAGTTT ATATTGTGAT |
| 841 | CCTACCAGGC TTCGGAATAA TCTCCCATAT TGTAACTTAC TACTCCGGAA AAAAAGAACC |
| 801 | ATTTGGATAC ATAGGTATGG TCTGAGCTAT GATATCAATT GGCTTCCTAG GGTTTATCGT |
| 961 | GTGAGCACAC CATATATTTA CAGTAGGAAT AGACGTAGAC ACACGAGCAT ATTTCACCTC |
| 1021 | CGCTACCATA ATCATCGCTA TCCCCACCGG CGTCAAAGTA TTTAGCTGAC TCGCCACACT |
| 1081 | CCACGGAAGC AATATGAAAT GATCTGCTGC AGTGCTCTGA GCCCTAGGAT TTATTTTTCT |
| 1141 | TTTGACCGTA GGTGGGCTGA CTGGCATTGT ATTAGCAAAC TCATCACTAG ACATCGTACT |
| 1201 | ACACGACACG TACTACGTTG TAGCCCACTT CCACTATGTC CTATCAATAG GAGCTGTATT |
| 1261 | TGCCATCATA GGAGGCTTCA TTCACTGATT TCCCCTATTC TCAGGCTACA CCCTAGACCA |
| 1321 | AACCTACGCC AAAATCCATT TCGCTATCAT ATTCATCGGC GTAAATCTAA CTTTCTTCCC |
| 1381 | ACAACACTTT CTCGGCCTAT CCGGAATGCC CCGACGTTAC TCGGACTATC CCGATGCATA |
| 1441 | CACCACATGA AATATCCTAT CATCTGTAGG CTCATTCATT TCTCTAACAG CAGTAATATT |
| 1501 | AATAATTTTC ATAATTTGAG AAGCCTTCGC TTCGAAGCGA AAAGTCCTAA TAGTAGAAGA |
| 1561 | ACCCTCCATA AACCTGGAGT GACTATATGG ATGCCCCCCA CGCTACCACA CATTCGAAGA |
| 1621 | ACCCGTATAC ATAAAATCTA GACAAAAAAG GAAGGAATCG AACCCCCCAA AGCTGGTTTC |
| 1681 | AAGCCAACCC CATGGCCTCC ATGACTTTTT CAAAAAGATA TTAGAAAAAC CATTTCATAA |
| 1741 | CTTTGTCAAA GTTAAATTAT AGGCTAAATC CTATATATCT TAATGGCACA TGCAGCGCAA |
| 1801 | GTAGGTCTAC AAAACGCTAC TTCCCCTATC ATAGAAGAGC TTATCATCTT TCATGATCAC |
| 1861 | GCCCTCATAA TCATTTTCCT TATCTGCTTC CTAGTCCTGT ACGCCCTTTT CCTAACACTC |
| 1921 | ACAACAAAAC TAACTAATAC TAACATCTCA GACGCTCAGG AAATAGAAAC CGTCTGAACT |
| 1981 | ATCCTGCCCG CCATCATCCT AGTCCTTATC GGGCTGCCAT CCCTACGCAT CCTTTACATA |
| 2041 | ACAGACGAGG TCAACGATCC CTCCTTTACC ATCAAATCAA TTGGCCATCA ATGGTACTGA |
| 2101 | ACCTACGAAT ACACGGACTA CGGCGGACTA ATCTTCAACT CCTACATACT TCCCCCATTA |
| 2161 | TTCCTAGAAC CAGGCGACCT GCGACTCCTT GACGTTGACA ATCGAGTAGT ACTCCCGGTT |
| 2221 | GAAGCCCCCA TTCGTATAAT AATTACATCA CAAGACGTCT TACACTCATG AGCTGTCCCC |
| 2281 | ACATTAGGCT TAAAAACAGA TGCAATTCCC GGACGTCTAA ACCAAACCAC TTTCACTGCT |
| 2341 | ACACGACCAG GGGTATACTA CGGCCAATGC TCTGAAATCT GTGGAGCAAA CCAGTTTTAT |
| 2401 | GCCCATCGTC CTAGAATTAA TTCCCCTAAA AATCTTTGAA ATAGGGCCTG TATTTACCCT |
| 2461 | ATAGCACCCC CTCTACCCCC TCTAGAGCCC ACTGTAAAGC TAACTTAGCA TTAACCTTTT |
| 2521 | AAGTTAAAGA TTAAGAGAAC CAACACCTCT TTACAGTGAA ATGCCCCAAC TAAATACTA |

GENBANK ID: NM_024409.1
DEFINITION HOMO SAPIENS NATRIURETIC PEPTIDE PRECURSOR C (NPPC), MRNA.
VERSION NM_024409.1 GI:13249345
CDS 1..381
/CODON_START=1

| | |
|---|---|
| 1 | ATGCATCTCT CCCAGCTGCT GGCCTGCGCC CTGCTGCTCA CGCTGCTCTC CCTCCGGCCC |
| 61 | TCCGAAGCCA AGCCCGGGGC GCCGCCGAAG GTCCCGCGAA CCCCGCCGGC AGAGGAGCTG |
| 121 | GCCGAGCCGC AGGCTGCGGG CGGCGGTCAG AAGAAGGGCG ACAAGGCTCC CGGGGGCGGG |
| 181 | GGCGCCAATC TCAAGGGCGA CCGGTCGCGA CTGCTCCGGG ACCTGCGCGT GGACACCAAG |
| 241 | TCGCGGGCAG CGTGGGCTCG CCTTCTGCAA GACCACCGCA ACGCGCGCAA ATACAARGGA |
| 301 | GCCAACAAGA AGGGCTTGTC CAAGGGCTGC TTCGGCCTCA AGCTGGACCG AATCGGCTCC |
| 361 | ATGAGCGGCC TGGGATGTTA G |

GENBANK ID: M37763.1
DNA LINEAR
DEFINITION HUMAN NEUROTROFHIN-3 (NT-3) GENE, COMPLETE CDS.
VERSION M37763.1 GI:189300
CDS 76..849
/CODON_START=1
GENE 76..849
MAT PEPTIDE 130..846

| | |
|---|---|
| 1 | TAACACAGAC TCAGCTGCCA GAGCCTGCTC TTAACACCTG TGTTTCCTTT TCAGATCTTA |
| 61 | CAGGTGAACA AGGTGATGTC CATCTTGTTT TATGTGATAT TTCTCGCTTA TCTCCGTGGC |
| 121 | ATCCAAGGTA ACAACATGGA TCAAAGGAGT TTGCCAGAAG ACTCGCTCAA TTCCCTCATT |
| 181 | ATTAAGCTGA TGCAGGCAGA TATTTTGAAA AACAAGCTCT CCAAGCAGAT GGTGGACGTT |
| 241 | AAGGAAAATT ACCAGAGCAC CCTGCCCAAA GCTGAGGCTC CCCGAGAGCC GGAGCGGGGA |
| 301 | GGGCCCGCCA AGTCAGCATT CCAGCCGGTG ATTGCAATGG ACACCGAACT GCTGCGACAA |
| 361 | CAGAGACGCT ACAACTCACC GCGGGTCCTG CTGAGCGACA GCACCCCCTT GGAGCCCCCG |
| 421 | CCCTTGTATC TCATGGAGGA TTACGTGGGC AGCCCCGTGG TGGCGAACAG ARCATCACGG |
| 481 | CGGAAACGGT ACGCGGAGCA TAAGAGTCAC CGAGGGGAGT ACTCGGTATG TGACAGTGAG |
| 541 | AGTCTGTGGG TGACCGACAA GTCATCGGCC ATCGACATTC GGGGACACCA GGTCACGGTG |
| 601 | CTGGGGGAGA TCAAAACGGG CAACTCTCCC GTCAAACAAT ATTTTTATGA AACGCGATGT |
| 661 | AAGGAAGCCA GGCCGGTCAA AAACGGTTGC AGGGGTATTG ATGATAAACA CTGGAACTCT |
| 721 | CAGTGCAAAA CATCCCAAAC CTACGTCCGA GCACTGACTT CAGAGAACAA TAAACTCGTG |
| 781 | GGCTGGCGGT GGATACGGAT AGACACGTCC TGTGTGTGTG CCTTGTCGAG AAAAATCGGA |
| 841 | AGAACATGAA TTGGCATCTC TCCCCATATA TAAATTATTA CTTTAAATTA TATGATATGC |
| 901 | ATGTAGCATA TAAATGTTTA TATTGTTTTT ATATATTATA AGTTGACCTT TATTTATTAA |
| 961 | ACTTCAGCAA CCCTACAGTA TATAAGCTTT TTTCTCAATA AAATCAGTGT GCTTGCCTTC |

GENBANK ID: NM_000932.1
DEFINITION HOMO SAPIENS PHOSPHOLIPASE C, BETA 3
(PHOSPHATIDYLINOSITOL-SPECIFIC) (PLCB3), MRNA.
VERSION NM_000932.1 GI:11386138
CDS 1..3705

| | |
|---|---|
| 1 | ATGGCGGGCG CCCAGCCCGG CGTCCACGCG CTGCAGTTGG AGCCGCCCAC CGTGGTGGAG |
| 61 | ACCCTGCGGC GCGGGAGTAA GTTCATCAAA TGGGACGAGG AGACCTCCAG TCGGAACCTG |
| 121 | GTGACCCTGC GTGTGGACCC CAATGGCTTC TTCTTGTACT GGACGGGCCC CAACATGGAG |
| 181 | GTGGACACAC TGGACATCAG TTCCATCAGG GACACACGGA CAGGCCGGTA CGCCCGCCTG |
| 241 | CCCAAGGACC CCAAGATCCG GGAAGTTCTG GGCTTTGGGG GTCCCGATGC CCGGCTGGAG |
| 301 | GAGAAGCTGA TGACGGTGGT GTCTGGGCCA GACCCGGTGA ACACAGTGTT CTTGAACTTC |
| 361 | ATGGCCGTGC AGGATGACAC AGCCAAGGTC TGGTCTGAGG AGCTATTCAA GCTGGCTATG |
| 421 | AACATCCTGG CTCAGAACGC CTCCCGGAAC ACCTTCCTGC GCAAAGCATA CACGAAGCTG |
| 481 | AAGCTGCAGG TGAACCAGGA TGGTCGGATC CCCGTCAAGA ACATCCTGAA GATGTTCTCA |
| 541 | GCAGACAAGA AGCGGGTGGA GACTGCGCTG GAATCCTGTG GCCTCAAATT CAACCGGAGT |
| 601 | GAGTCCATCC GGCCTGATGA GTTTTCCTTG GAAATCTTTG AGCGGTTCCT GAACAAGCTG |
| 661 | TGTCTGCGGC CGGACATTGA CAAGATCCTG CTGGAGATAG GCGCCAAGGG CAAGCCATAC |
| 721 | CTGACGCTGG AGCAGCTCAT GGACTTCATC AACCAGAAGC AACGCGACCC GAGACTCAAC |
| 781 | GAAGTGCTGT ACCCGCCCCT GCGGCCCTCC CAGGCCCGGC TGCTCATCGA AAAGTATGAG |
| 841 | CCCAACCAGC AGTTTCTGGA GCGAGACCAG ATGTCCATGG AGGGCTTTAG CCGCTACCTG |
| 901 | GGAGGCGAGG AGAATGGCAT CCTGCCCCTG GAAGCCCTGG ATCTGAGCAC GGACATGACC |
| 961 | CAGCCACTGA GTGCCTACTT CATCAACTCC TCGCATAACA CCTATCTCAC TGCGGGGCAG |
| 1021 | CTGGCTGGGA CCTCGTCGGT GGAGATGTAC CGCCAGGCAC TACTATGGGG CTGCCGCTGC |
| 1081 | GTGGAGCTGG ACGTGTGGAA GGGACGGCCG CCTGAGGAGG AACCCTTCAT TACCCACGGC |
| 1141 | TTCACCATGA CCACAGAGGT GCCTCTGCGC GACGTGCTGG AGGCCATTGC CGAGACTGCC |
| 1201 | TTCAAGACCT CGCCCTACCC CGTCATCCTC TCCTTCGAGA ACCATGTGGA CTCGGCAAAG |
| 1261 | CAACAGGCAA AGATGGCTGA GTACTGCCGC TCCATCTTTG GAGACGCGCT ACTCATCGAG |
| 1321 | CCTCTGGACA AGTACCCGCT GGCCCCAGGC GTTCCCCTGC CCAGCCCCCA GGACCTGATG |
| 1381 | GGCCGTATCC TGGTGAAGAA CAAGAAGCCG CACCGACGCA GCGCAGGTGG CCCAGACAGC |
| 1441 | GCCGGGCGCA AGCGGCCCCT GGAGCAGAGC AATTCTGCCC TGAGCGAGAG CTCCGCGGCC |
| 1501 | ACCGAGCCCT CCTCCCCGCA GCTGCGGTCT CCCAGCTCTG ACAGCTGCCC AGGCCTGAGC |
| 1561 | AATGGGGAGG AGGTAGGCCT TCACAAGCCC ACCCTGCAGC CTCAGAAGTC TCTCGGTGAC |
| 1621 | GAGCGCCTGA ACCGAGGCCC CTATGTTCTT GGACCTGCTG ACCGTGAGGA TGAGGAGGAA |
| 1681 | GATGAGCAAG AGCAGGAACA GACAGACCCC AAAAAGCCAA CTACAGATGA GGGGACAGCC |
| 1741 | AGCAGCGAGG TGAATGCCAC TGAGGAGATG TCCACGCTTG TCAACTACAT CGAACCTGTC |
| 1801 | AAGTTCAAGT CCTTTGAGGC TGCTCGAAAG AGGAACAAAT GCTTCGAGAT GTCGTCCTTT |
| 1861 | GTGGAGACCA AGGCCATGGA GCAACTGACC AAGAGCCCCA TGGAGTTTGT GGAATACAAC |
| 1921 | AAGCAGCAGC TCAGCCGCAT CTACCCCAAG GGCACCCGCG TGGACTCCTC CAACTACATG |
| 1981 | CCCCAGCTCT TCTGGAACGT AGGGTGCCAG CTTGTTGCGC TCAACTTCCA GACCCTCGAT |
| 2041 | GTGGCGATGC AGCTCAACGC GGGCGTTTTT GAGTACAACG GGCGCAGCGG GTACCTGCTC |
| 2101 | AAGCCGGAGT TCATGCGGCG GCCGGACAAG TCCTTCGACC CCTTCACTGA GGTCATCGTG |
| 2161 | GATGGCATCG TGGCCAATGC CTTGCGGGTC AAGGTGATCT CAGGGCAGTT CCTGTCCGAC |
| 2221 | AGGAAGGTGG GCATCTACGT GGAGGTGGAC ATGTTTGGCC TCCCTGTTGA TACGCGGCGC |
| 2281 | AAGTACCGCA CCCGGACCTC TCAGGGGAAC TCGTTCAACC CCGTGTGGGA CGAAGAGCCC |
| 2341 | TTCGACTTCC CCAAGGTGGT GCTGCCCACG CTGGCTTCAC TTCGCATTGC AGCCTTTGAG |
| 2401 | GAGGGGGGTA AATTCGTAGG GCACCGGATC CTGCCTGTCT CTGCCATCCG CTCCGGATAC |
| 2461 | CACTACGTGT GCCTGCGGAA CGAGGCCAAC CAACCGCTGT GCCTGCCGGC CCTGCTCATC |
| 2521 | TACACCGAAG CCTCGGACTA CATTCCTGAC GACCACCAGG ACTATGCGGA GGCCCTGATC |
| 2581 | AACCCCATTA AGCACGTCAG CCTGATGGAC CAGAGGGCCC GGCAGCTGGC CGCCCTCATT |
| 2641 | GGGGAGAGTG AGGGTGAGGC TGGCCAAGAG ACGTGCCAGG ACACCCAGTC TCAGCAGCTG |
| 2701 | GGGTCTCAGC CGTCCTCAAA CCCCACCCCC AGCCCACTGG ATGCCTCCCC CCGCCGGCCC |
| 2761 | CCTGGCCCCA CCACCTCCCC TGCCAGCACC TCCCTCAGCA GCCCAGGGCA GCGTGATGAT |
| 2821 | CTCATCGCCA GCATCCTCTC AGAGGTGGCC CCCACCCCGC TGGATGAGCT CCGAGGTCAC |
| 2881 | AAGGCTCTGG TCAAGCTCCG GAGCCGGCAA GAGCGAGACC TGCGGGAGCT GCGCAAGAAG |
| 2941 | CATGAGGGGA AGGCAGTCAC CCTCACCCGC CGCCTGCTGG ATGGCCTGGC TCAGGCACAG |
| 3001 | GCTGAGGGCA GGTGCCGGCT GCGGCCAGGT GCCCTAGGTG GGGCCGCTGA TGTGGAGGAC |
| 3061 | ACGAAGGAGG GGGAGGACGA GGCAAAGCGG TATCAGGAGT TCCAGAACAG ACAGGTGCAG |
| 3121 | AGCCTGCTGG AGCTGCGGGA GGCCCAGGTG GACGCAGAGG CCCAGCGGAG GCTGGAACAC |
| 3181 | CTGAGACAGG CTCTGCAGCG GCTCAGGGAG GTCGTCCTTG ATGCAAACAC AACTCAGTTC |
| 3241 | AAGAGGCTGA AAGAGATGAA CGAGAGGGAG AAGAAGGAGC TGCAGAAGAT CCTGGACAGA |
| 3301 | AAGCGCCATA ACAGCATCTC GGAGGCCAAG ATGAGGGACA AGCATAAGAA GGAGGCGGAA |
| 3361 | CTGACGGAGA TTAACCGTCG GCACATCACT GAGTCAGTCA ACTCCATCCG TCGGCTGGAG |
| 3421 | GAGGCCCAGA AGCAGCGGCA TGACCGTCTT GTGGCTGGGC AGCAGCAGGT CCTGCAACAG |
| 3481 | CTGGCAGAAG AGGAGCCCAA GCTGCTGGCC CAGCTGGCCC AGGAGTGTCA GGAGCAGCGG |
| 3541 | GCGAGGCTCC CCCAGGAGAT CCGCCGGAGC CTGCTGGGCG AGATGCCGGA GGGGCTGGGG |
| 3601 | GACGGGCCTC TGGTGGCCTG TGCCAGCAAC GGTCACGCAC CCGGGAGCAG CGGGCACCTG |
| 3661 | TCGGGCGCTG ACTCGGAGAG CCAGGAGGAG AACACGCAGC TCTGA |

GENBANK ID: D13119.1
DEFINITION HOMO SAPIENS P2 MRNA FOR ATP SYNTHASE SUBUNIT C, COMPLETE CDS.
VERSION D13119.1 GI:285909
CDS 31..456
/CODON_START=1

| | |
|---|---|
| 1 | TCTCCTGCCA CAGCTCCTCA CCCCCTGAAA ATGTTCGCCT GCTCCAAGTT TGTCTCCACT |
| 61 | CCCTCCTTGG TCAAGAGCAC CTCACAGCTG CTGAGCCGTC CGCTATCTGC AGTGGTGCTG |
| 121 | AAACGACCGG AGATACTGAC AGATGAGAGC CTCAGCAGCT TGGCAGTCTC ATGTCCCCTT |
| 181 | ACCTCACTTG TCTCTAGCCG CAGCTTCCAA ACCAGCGCCA TTTCAAGGGA CATCGACACA |
| 241 | GCAGCCAAGT TCATTGGAGC TGGGGCTGCC ACAGTTGGGG TGGCTGGTTC TGGGGCTGGG |
| 301 | ATTGGAACTG TGTTTGGGAG CCTCATCATT GGTTATGCCA GGAACCCTTC TCTGAAGCAA |
| 361 | CAGCTCTTCT CCTACGCCAT TCTGGGCTTT GCCCTCTCGG AGGCCATGGG GCTCTTTTGT |
| 421 | CTGATGGTAG CCTTTCTCAT CCTCTTTGCC ATGTGAAGGA GCCGTCTCCA CCTCCCATAG |
| 481 | TTCTCCCGCG TCTGGTTGGC CCCGTGTGTT CCTTTTCCTA TACCTCCCCA GGCAGCCTGG |
| 541 | GGAACGTGGT TGGCTCAGGG TTTGACAGAG AAAAGACAAA TAAATACTGT ATTAATAAG |

GENBANK ID: NM_004530.1
DEFINITION HOMO SAPIENS MATRIX METALLOPROTEINASE 2 (GELATINASE A, 72KD
GELATINASE, 72KD TYPE IV COLLAGENASE) (MMP2), MRNA.
VERSION NM_004530.1 GI:11342665
CDS 290..2272
/CODON_START=1

| | |
|---|---|
| 1 | TGTTTCCGCT GCATCCAGAC TTCCTCAGGC GGTGGCTGGA GGCTGCGCAT CTGGGGCTTT |
| 61 | AAACATACAA AGCGATTGCC AGGACCTGCG GCGGCGGCGG CGGCGGCGGG GGCTGGGGCG |
| 121 | CGGGGGCCGG ACCATGAGCC GCTCAGCCGG GCAAACCCCA GGCCACCGAG CCAGCGGACC |
| 181 | CTCGGAGCGC AGCCCTGCGC CGCGGACCAG GCTCCAACCA GGCGGCGAGG CGGCCACACG |
| 241 | CACCGAGCCA GCGACCCCCG GGCGACGCGC GGGGCCAGGG AGCGCTACGA TGGAGGCGCT |
| 301 | AATGGCCCGG GGCGCGCTCA CGCGTCCCCT GAGGGCGCTC TGTCTCCTGG GCTGCCTGCT |
| 361 | GAGCCACGCC GCCGCCGCGC CGTCGCCCAT CATCAAGTTC CCCGGCGATG TCGCCCCCAA |
| 421 | AACGGACAAA GAGTTGGCAG TGCAATACCT GAACACCTTC TATGGCTGCC CCAAGGAGAG |
| 481 | CTGCAACCTG TTTGTGCTGA AGGACACACT AAAGAAGATG CAGAAGTTCT TTGGACTGCC |
| 541 | GCAGACAGCT GATCTTGACC AGAATACCAT CGAGACCATG CGGAAGCCAC GCTGCGGCAA |
| 601 | CCCAGATGTG GCCAACTACA ACTTCTTCCC TCGCAAGCCC AAGTGGGACA AGAACCAGAT |
| 661 | CACATACAGG ATCATTGGCT ACACACCTGA TCTGGACCCA GAGACAGTGG ATGATGCCTT |
| 721 | TGCTCGTGCC TTCCAAGTCT GGAGCGATGT GACCCCACTG CGGTTTTCTC GAATCCATGA |
| 781 | TGGAGAGGCA GACATCATGA TCAACTTTCG CCGCTGGGAG CATGGCGATG GATACCCCTT |
| 841 | TGACGGTAAG GACGGACTCC TGGCTCATCC CTTCGCCCCA GGCACTGGTG TTGGGGGAGA |
| 901 | CTCCCATTTT GATGACGATG AGCTATGGAC CTTGGGAGAA GGCCAAGTGG TCCGTGTGAA |
| 961 | GTATGGCAAC GCCGATGGGG AGTACTGCAA GTTCCCCTTC TTGTTCAATG GCAAGGAGTA |
| 1021 | CAACAGCTGC ACTGATACTG GCCGCAGCGA TGGCTTCCTC TGGTCCTCCA CCACCTACAA |
| 1081 | CTTTGAGAAG GATGGCAAGT ACGGCTTCTG TCCCCATGAA GCCCTGTTCA CCATGGGCGG |
| 1141 | CAACGCTGAA GGACAGCCCT GCAAGTTTCC ATTCCGCTTC CAGGGCACAT CCTATGACAG |
| 1201 | CTGCACCACT GAGGGCCGCA CCGATGGCTA CCGCTGGTGC GGCACCACTG AGGACTACGA |
| 1261 | CCGCGACAAG AAGTATGGCT TCTGCCCTGA GACCGCCATG TCCACTGTTG GTGGGAACTC |
| 1321 | AGAAGGTGCC CCCTGTGTCT TCCCCTTCAC TTTCCTGGGC AACAAATATG AGAGCTGCAC |
| 1381 | CAGCGCCGGC CGCAGTGACG GAAAGATGTG GTGTGCGACC ACAGCCAACT ACGATGACGA |
| 1441 | CCGCAAGTGG GGCTTCTGCC CTGACCAAGG GTACAGCCTG TTCCTCGTGG CAGCCCACGA |
| 1501 | GTTTGGCCAC GCCATGGGGC TGCAGCACTC CCAAGACCCT GGGGCCCTGA TGGCACCCAT |
| 1561 | TTACACCTAC ACCAAGAACT TCCGTCTGTC CCAGGATGAC ATCAAGGGCA TTCAGGAGCT |
| 1621 | CTATGGGGCC TCTCCTGACA TTGACCTTGG CACCGGCCCC ACCCCCACAC TGGGCCCTGT |
| 1681 | CACTCCTGAG ATCTGCAAAC AGGACATTGT ATTTGATGGC ATCGCTCAGA TCCGTGGTGA |
| 1741 | GATCTTCTTC TTCAAGGACC GGTTCATTTG GCGGACTGTG ACGCCACGTG ACAAGCCCAT |
| 1801 | GGGGCCCCTG CTGGTGGCCA CATTCTGGCC TGAGCTCCCG GAAAAGATTG ATGCGGTATA |
| 1861 | CGAGGCCCCA CAGGAGGAGA AGGCTGTGTT CTTTGCAGGG AATGAATACT GGATCTACTC |
| 1921 | AGCCAGCACC CTGGAGCGAG GGTACCCCAA GCCACTGACC AGCCTGGGAC TGCCCCCTGA |
| 1981 | TGTCCAGCGA GTGGATGCCG CCTTTAACTG GAGCAAAAAC AAGAAGACAT ACATCTTTGC |
| 2041 | TGGAGACAAA TTCTGGAGAT ACAATGAGGT GAAGAAGAAA ATGGATCCTG GCTTTCCCAA |
| 2101 | GCTCATCGCA GATGCCTGGA ATGCCATCCC CGATAACCTG GATGCCGTCG TGGACCTGCA |
| 2161 | GGGCGGCGGT CACAGCTACT TCTTCAAGGG TGCCTATTAC CTGAAGCTGG AGAACCAAAG |
| 2221 | TCTGAAGAGC GTGAAGTTTG GAAGCATCAA ATCCGACTGG CTAGGCTGCT GAGCTGGCCC |
| 2281 | TGGCTCCCAC AGGCCCTTCC TCTCCACTGC CTTCGATACA CCGGGCCTGG AGAACTAGAG |
| 2341 | AAGGACCCGG AGGGGCCTGG CAGCCGTGCC TTCAGCTCTA CAGCTAATCA GCATTCTCAC |
| 2401 | TCCTACCTGG TAATTTAAGA TTCCAGAGAG TGGCTCCTCC CGGTGCCCAA GAATAGATGC |
| 2461 | TGACTGTACT CCTCCCAGGC GCCCCTTCCC CCTCCAATCC CACCAACCCT CAGAGCCACC |
| 2521 | CCTAAAGAGA TCCTTTGATA TTTTCAACGC AGCCCTGCTT TGGGCTGCCC TGGTGCTGCC |
| 2581 | ACACTTCAGG CTCTTCTCCT TTCACAACCT TCTGTGGCTC ACAGAACCCT TGGAGCCAAT |
| 2641 | GGAGACTGTC TCAAGAGGGC ACTGGTGGCC CGACAGCCTG GCACAGGGCA GTGGGACAGG |
| 2701 | GCATGGCCAG GTGGCCACTC CAGACCCCTG GCTTTTCACT GCTGGCTGCC TTAGAACCTT |
| 2761 | TCTTACATTA GCAGTTTGCT TTGTATGCAC TTTGTTTTTT TCTTTGGGTC TTGTTTTTTT |
| 2821 | TTTCCACTTA GAAATTGCAT TTCCTGACAG AAGGACTCAG GTTGTCTGAA GTCACTGCAC |
| 2881 | AGTGCATCTC AGCCCACATA GTGATGGTTC CCCTGTTCAC TCTACTTAGC ATGTCCCTAC |
| 2941 | CGAGTCTCTT CTCCACTGGA TGGAGGAAAA CCAAGCCGTG GCTTCCCGCT CAGCCCTCCC |
| 3001 | TGCCCCTCCC TTCAACCATT CCCCATGGGA AATGTCAACA AGTATGAATA AAGACACCTA |
| 3061 | CTGAGTGGC |

GENBANK ID: NN_000852.2
DEFINITION HOMO SAPIENS GLUTATHIONE S-TRANSFERASE PI (GSTP1), MRNA.
VERSION NM_000852.2 GI:6552334
CDS 30..662

| | |
|---|---|
| 1 | GGAGTTTCGC CGCCGCAGTC TTCGCCACCA TGCCGCCCTA CACCGTGGTC TATTTCCCAG |
| 61 | TTCGAGGCCG CTGCGCGGCC CTGCGCATGC TGCTGGCAGA TCAGGGCCAG AGCTGGAAGG |
| 121 | AGGAGGTGGT GACCGTGGAG ACGTGGCAGG AGGGCTCACT CAAAGCCTCC TGCCTATACG |
| 181 | GGCAGCTCCC CAAGTTCCAG GACGGAGACC TCACCCTGTA CCAGTCCAAT ACCATCCTGC |
| 241 | GTCACCTGGG CCGCACCCTT GGGCTCTATG GGAAGGACCA GCAGGAGGCA GCCCTGGTGG |
| 301 | ACATGGTGAA TGACGCCGTG GAGGACCTCC GCTGCAAATA CATCTCCCTC ATCTACACCA |
| 361 | ACTATGAGGC GGGCAAGGAT GACTATGTGA AGGCACTGCC CGGGCAACTG AAGCCTTTTG |
| 421 | AGACCCTGCT GTCCCAGAAC CAGGGAGGCA AGACCTTCAT TGTGGGAGAC CAGATCTCCT |
| 481 | TCGCTGACTA CAAGCTGCTG GACTTGCTGC TGATCCATGA GGTCCTAGCC CCTGGCTGCC |
| 541 | TGGATGCGTT CCCCCTGCTC TCAGCATATG TGGGCCGCCT CACCGCCCGG CCCAAGCTCA |
| 601 | AGGCCTTCCT GGCCTCCCCT CAGTACGTGA ACCTCCCCAT CAATGGCAAC GGGAAACAGT |
| 661 | GAGGGTTGGG GGGACTCTGA GCGGGAGGCA GAGTTTGCCT TCCTTTCTCC AGGACCAATA |
| 721 | AAATTTCTAA GAGAGCT |

GENBANK ID: XM_016524.4
DEFINITION HOMO SAPIENS CREATINE KINASE, MITOCHONDRIAL 1 (UBIQUITOUS)
(CENT1) ,MRNA.
VERSION XM_016524.4 GI:17477504
CDS 358..1704
/CODON_START=1

| | |
|---|---|
| 1 | CGCGCGAGTC TCAGGTCCCG CTAATTACCT GGCGGGTGCT GCCCACCCCT GCCCTCGCGC |
| 61 | ACCTACCGCG GTGGCAGGCG GGAAGGCGGG GCCTGGGGGA GCCCCACCCC TGGAGACTGC |
| 121 | GGCTGGGGCC TCCCTCTCCT CCGCCCGCCC GCCTGCCACT AGCTCATTGC GCCTCTCCTG |
| 181 | CAGTCTGATT GGCACCGGCT CCCATTCCGG CTCCAGCCTC CAATCCGACC CCCATTTCGG |
| 241 | CTGCAGCCTC GGACCTAGCT CCGGCCCTCG GTCTATCCGG TTGCATCCTC CCTCCCTGTT |
| 301 | CCGGATCTTA TCTTGCGCCA GCGCCTACTC CAGGATCCCG TACCGAGACG TCAAGCCATG |
| 361 | GCTGGTCCCT TCTCCCGTCT GCTGTCCGCC CGCCGGGGAC TCAGGCTCCT GGCTTTGGCC |
| 421 | GGAGCGGGGT CTCTAGCCGC TGGGTTTCTG CTCCGACCGG AACCTGTACG AGCTGCCAGT |
| 481 | GAACGACGGA GGCTGTATCC CCCGAGCCAG ACATGGCCAA CTGGACAGCT CCCAGGTAAC |
| 541 | TGCACTAGGT CTAGGCGTCT GTGCCCTCCC TCCATGGTTA CTGGGTACCC CCTCCCCAGC |
| 601 | GCTGAGTACC CAGACCTCCG AAAGCACAAC AACTGCATGG CCAGTCACCT GACCCCAGCA |
| 661 | GTCTATGCAC GGCTCTGCGA CAAGACCACA CCCACTGGTT GGACGCTAGA TCAGTGTATC |
| 721 | CAGACTGGCG TGGACAACCC TGGCCACCCC TTCATCAAGA CTGTGGGCAT GGTGGCTGGA |
| 781 | GATGAGGAGA CCTATGAGGT ATTTGCTGAC CTGTTTGACC CTGTGATCCA AGAGGGACAC |
| 841 | AATGGATATG ACCCCCGGAC AATGAAGCAC ACCACGGATC TAGATGCCAG TAAAATCCGT |
| 901 | TCTGGCTACT TTGATGAGAG GTATGTATTG TCCTCTAGAG TCAGAACTGG CCGAAGCATC |
| 961 | CGAGGACTCA GTCTGCCTCC AGCTTGCACT CGAGCAGAGC GACGAGAGGT GGAACGTGTT |
| 1021 | GTGGTGGATG CACTGAGTGG CCTGAAGGGT GACCTGGCTG GACGTTACTA TAGGCTCAGT |
| 1081 | GAGATGACAG AGGCTGAACA GCAGCAGCTT ATTGATGACC ACTTTCTGTT TGATAAGCCT |
| 1141 | GTGTCCCCGT TGCTGACTGC AGCAGGAATG GCTCGAGACT GGCCAGATGC TCGTGGAATT |
| 1201 | TGGCACAACA ATGAGAAGAG CTTCCTGATC TGGGTGAATG AGGAGGATCA TACACGGGTG |
| 1261 | ATCTCCATGG AGAAGGGTGG TAACATGAAG AGAGTGTTTG AAAGATTCTG CCGAGGCCTC |
| 1321 | AAAGAGGTGG AGAGACTTAT CCAAGAACGT GGCTGGGAGT TCATGTGGAA TGAGCGTTTG |
| 1381 | GGATACATCT TGACCTGTCC ATCTAACCTG GGCACTGGAC TTCGGGCAGG AGTGCACATC |
| 1441 | AAACTGCCCC TGCTAAGCAA AGATAGCCGC TTCCCAAAGA TCCTGGAGAA CCTAAGACTC |
| 1501 | CAAAAACGTG GTACTGGAGG AGTGGACACT GCTGCTACAG GCGGTGTCTT TGATATTTCT |
| 1561 | AATTTGGACC GACTAGGCAA ATCAGAGGTG GAGCTGGTGC AACTGGTCAT CGATGGAGTA |
| 1621 | AACTATTTGA TTGATTGTGA ACGGCGTCTG GAGAGAGGUC AGGATATCCG CATCCCCACA |
| 1681 | CCTGTCATCC ACACCAAGCA TTAACTCCCC ATCGCCAGCT GATGACTCAA GATTCCCAGG |
| 1741 | AGTTCTGCTC ATTCTAATGA TGGCCCATTC TACTTGCTCT GGACCTGCCC CCGCATCCCC |
| 1801 | TGCCTCCATC CTAGTAAAGA CTCCTTGCTA TGCTGC |

GENBANK ID: NM_001443.1
DEFINITION HOMO SAPIENS FATTY ACID BINDING PROTEIN 1, LIVER (FABP1),
MRNA. VERSION NM_001443.1 GI:4557576
CDS 43..426

| | |
|---|---|
| 1 | AGAGCCGCAG GTCAGTCGTG AAGAGGGAGC TCTATTGCCA CCATGAGTTT CTCCGGCAAG |
| 61 | TACCAACTGC AGAGCCAGGA AAACTTTGAA GCCTTCATGA AGGCAATCGG TCTGCCGGAA |
| 121 | GAGCTCATCC AGAAGGGGAA GGATATCAAG GGGGTGTCGG AAATCGTGCA GAATGGGAAG |
| 181 | CACTTCAAGT TCACCATCAC CGCTGGGTCC AAAGTGATCC AAAACGAATT CACGGTGGGG |
| 241 | GAGGAATGTG AGCTGGAGAC AATGACAGGG GAGAAAGTCA AGACAGTGGT TCAGTTGGAA |
| 301 | GGTGACAATA AACTGGTGAC AACTTTCAAA AACATCAAGT CTGTGACCGA ACTCAACGGC |
| 361 | GACATAATCA CCAATACCAT GACATTGGGT GACATTGTCT TCAAGAGAAT CAGCAAGAGA |
| 421 | ATTTAAACAA GTCTGCATTT CATATTATTT TAGTGTGTAA AATTAATGTA ATAAAGTGAA |
| 481 | CTTTGTTTT |

GENBANK ID: NM_001220.1
DEFINITION HOMO SAPIENS CALCIUMCALNODULINDEPENDENT PROTEIN KINASE (CAN
KINASE) II BETA (CZANK2B), MRNA.
VERSION NM_001220.1 GI:10835005
CDS 47..1675

| | |
|---|---|
| 1 | GCGGCCCGCG TCGACCGAGC GCACGCCCAG CCCCTCCGCC GCCGCCATGG CCACCACGGT |
| 61 | GACCTGCACC CGCTTCACCG ACGAGTACCA GCTCTACGAG GATATTGGCA AGGCGGCTTT |
| 121 | CTCTGTGGTC CGACGCTGTG TCAAGCTCTG CACCGGCCAT GACTATGCAG CCAAGATCAT |
| 181 | CAACACCAAG AAGCTGTCAG CCAGAGATCA CCAGAAGCTG GAGAGACAGG CTCGGATCTG |
| 241 | CCGCCTTGTG AAGCATTCCA ACATCGTGCG TCTCCACGAC AGCATCTCCG AGGAGGGCTT |
| 301 | CCACTACCTG GTCTTCGATC TGGTCACTGG TGGGGAGCTC TTTGAAGACA TTGTGGCGAG |
| 361 | AGAGTACTAC AGCGAGGCTG ATGCCAGTCA CTGTATCCAG CAGATCCTGK AGGCCGTTCT |
| 421 | CCATTGTCAC CAAATGGCCG TCCTCCACAG AGACCTCAAG CCGSAGAACC TGCTTCTGGC |
| 481 | CAGCAAGTGC AAAGGGGCTG CAGTGAAGCT GGCAGACTTC GGCCTAGCTA TCGAGGTGCA |
| 541 | GGGGGACCAG CAGGCATGGT TTGGTTTCGC TGGCACACCA GCCTACCTGT CCCCTGAGGT |
| 601 | CCTTCGCAAA GAGGCGTACG GCAAGCCCGT GGACATCTGG GCATGTGGGG TGATCCTGTA |
| 661 | CATCCTGCTC GTGGGCTACC CACCCTTCTG GGACGAGGAC CAGCACAAGC TGTACCAGCA |
| 721 | GATCAAGGCT GGTGCCTATG ACTTCCCGTC CCCTGAGTGG GACACCGTCA CTCCTGAAGC |
| 781 | CAAAAACCTC ATCAACCAGA TGCTGACCAT CAACCCTGCC AAGCGCATCA CAGCCCATGA |
| 841 | GGCCCTGAAG CACCCGTGGG TCTGCCAACG CTCCACGGTA GCATCCATGA TGCACAGACA |
| 901 | GGAGACTGTG GAGTGTCTGA AAAAGTTCAA TGCCAGGAGA AAGCTCAAGG GAGCCATCCT |
| 961 | CACCACCATG CTGGCCACAC GGAATTTCTC AGTGGGCAGA CAGACCACCG CTCCGGCCAC |
| 1021 | AATGTCCACC GCGGCCTCCG GCACCACCAT GGGGCTGGTG GAACAAGCCA AGAGTTTACT |
| 1081 | CAACAAGAAA GCAGATGGAG TCAAGCCCCA GACGAATAGT ACCAAAAACA GTGCAGCCGC |
| 1141 | CACCAGCCCC AAAGGGACGC TTCCTCCTGC CGCCCTGGAG CCTCAAACCA CCGTCATCCA |
| 1201 | TAACCCAGTG GACGGGATTA AGGAGTCTTC TGACAGTGCC AATACCACCA TAGAGGATGA |
| 1281 | AGACGCTAAA GCCCGGAAGC AGGAGATCAT TAAGACCACG GAGCAGCTCA TCGAGGCCGT |
| 1321 | CAACAACGGT GACTTTGAGG CCTACGCGAA AATCTGTGAC CCAGGGCTGA CCTCGTTTGA |
| 1381 | GCCTGAAGCA CTGGGCAACC TGGTTGAAGG GATGGACTTC CACAGATTCT ACTTCGAGAA |
| 1441 | CCTGCTGGCC AAGAACAGCA AGCCGATCCA CACGACCATC CTGAACCCAC ACGTGCACGT |
| 1501 | CATTGGAGAG GATGCCGCCT GCATCGCTTA CATCCGGCTC ACGCAGTACA TTGACGGGCA |
| 1561 | GGGCCGGCCC CGCACCAGCC AGTCTGAGGA GACCCGCGTG TGGCACCGCC GCGACGGCAA |
| 1621 | GTGGCAGAAC GTGCACTTCC ACTGCTCGGG CGCGCCTGTG GCCCCGCTGC AGTGAAGAGC |
| 1681 | TGCGCCCTGG TTTCGCCGGA CAGAGTTGGT GTTTGGAGCC CGACTGCCCT CGGGCACACG |
| 1741 | GCCTGCCTGT CGCATGTTTG TGTCTGCCTC GTTCCCTCCC CTGGTTCCTG TGTGTGCAGA |
| 1801 | AAAACAAGAC CAGATGTGAT TTGTT |

GENBANK ID: NM_001677.1
DEFINITION HOMO SAPIENS ATPASE, NA+K+TRANSPORTING, BETA 1 POLYPEPTIDE
(ATP1B1), MRNA.
VERSION NM_001677.1 GI:4502276
CDS 127..1038

| | |
|---|---|
| 1 | GAATTCATGC TAAATTGCTG GAAGGCTGCG TCTCTGCTGT GGTGTCAGTT CCGGATGCCT |
| 61 | CATCGCCAGG GGCGCGCCGC AGCCACCCAC CCTCCGGACC GCGGCAGCTG CTGACCCGCC |
| 121 | ATCGCCATGG CCCGCGGGAA AGCCAAGGAG GAGGGCAGCT GGAAGAAATT CATCTGGAAC |
| 181 | TCAGAGAAGA AGGAGTTTCT GGGCAGGACC GGTGGCAGTT GGTTTAAGAT CCTTCTATTC |
| 241 | TACGTAATAT TTTATGGCTG CCTGGCTGGC ATCTTCATCG GAACCATCCA AGTGATGCTG |
| 301 | CTCACCATCA GTGAATTTAA GCCCACATAT CAGGACCGAG TGGCCCCGCC AGGATTAACA |
| 361 | CAGATTCCTC AGATCCAGAA GACTGAAATT TCCTTTCGTC CTAATGATCC CAAGAGCTAT |
| 421 | GAGGCATATG TACTGAACAT AGTTAGGTTC CTGGAAAAGT ACAAAGATTC AGCCCAGAGG |
| 481 | GATGACATGA TTTTTGAAGA TTGTGGCGAT GTGCCCAGTG AACCGAAAGA ACGAGGAGAC |
| 541 | TTTAATCATG AACGAGGAGA GCGAAAGGTC TGCAGATTCA AGCTTGAATG GCTGGGAAAT |
| 601 | TGCTCTGGAT TAAATGATGA AACTTATGGC TACAAAGAGG GCAAACCGTG CATTATTATA |
| 661 | AAGCTCAACC GAGTTCTAGG CTTCAAACCT AAGCCTCCCA AGAATGAGTC CTTGGAGACT |
| 721 | TACCCAGTGA TGAAGTATAA CCCAAATGTC CTTCCCGTTC AGTGCACTGG CAAGCGAGAT |
| 781 | GAAGATAAGG ATAAAGTTGG AAATGTGGAG TATTTTGGAC TGGGCAACTC CCCTGGTTTT |
| 841 | CCTCTGCAGT ATTATCCGTA CTATGGCAAA CTCCTGCAGC CCAAATACCT GCAGCCCCTG |
| 901 | CTGGCCGTAC AGTTCACCAA TCTTACCATG GACACTGAAA TTCGCATAGA GTGTAAGGCG |
| 961 | TACCGTGAGA ACATTGGGTA CAGTGAGAAA GACCGTTTTC AGGGACGTTT TGATGTAAAA |
| 1021 | ATTGAAGTTA AGAGCTGATC ACAAGCACAA ATCTTTCCCA CTAGCCATTT AATAAGTTAA |
| 1081 | AAAAAGATAC AAAAACAAAA ACCTACTAGT CTTGAACAAA CTGTCATACG TATGGGACCT |
| 1141 | ACACTTAATC TATATGCTTT ACACTAGCTT TCTGCATTTA ATAGGTTAGA ATGTAAATTA |
| 1201 | AAGTGTAGCA ATAGCAACAA AATATTTATT CTACTGTAAA TGACAAAAGA AAAAGAAAAA |
| 1261 | TTGAGCCTTG GGACGTGCCC ATTTTTACTG TAAATTATGA TTCCGTAACT GACCTTGTAG |
| 1321 | TAAGCAGTGT TTCTGGCCCC TAAGTATTGC TGCCTTGTGT ATTTTATTTA GTGTACAGTA |
| 1381 | CTACAGGTGC ATACTCTGGT CATTTTTCAA GCCATGTTTT ATTGTATCTG TTTTCTACTT |
| 1441 | TATGTGAGCA AGGTTTGCTG TCCAAGGTGT AAATATTCAA CGGGAATAAA ACTGGCATGG |
| 1501 | TAATTTTTTT TTTTTGTTTG TTTTTTGTTT TTTGGCTCTT TCAAAGGTAA TGGCCCATCG |
| 1561 | ATGAGCATTT TTAACATACT CCATAGTCTT TTCCTGTGGT GTTAGGTCTT TATTTTTATT |
| 1621 | TTTTTCCTGG GGGCTGGGGT CGGGGTTTGT CATGGGGGAA CTGCCCTTTA AATTTTAAGT |
| 1681 | GACACTACAG AAAAACACAA AAAGGTGATG GGTTGTGTTA TGCTTGTATT GAATCCTGTC |
| 1741 | TTGACATCTC TTGCCTTGTC CTCCGGTATG TTCTAAAGCT GTGTCTGAGA TCTGGATCTG |
| 1801 | CCCATCACTT TGGCCTAGGG ACAGGGCTAA TTAATTTGCT TTATACATTT TCTTTTACTT |
| 1861 | TCCTTTTTTC CTTTCTGGAG GCATCACATG CTGGTGCTGT GTCTTTATGA ATGTTTTAAC |
| 1921 | CATTTTCATG GTGGAAGAAT TTTATATTTA TGCAGTTGTA CAATTTTATT TTTTTCTGCA |
| 1981 | AGAAAAAGTG TAATGTATGA AATAAACCAA AGTCACTTGT TTGAAAATAA ATCTTTATTT |
| 2041 | TGAACTTTAT AAAAGCAATG CAGTACCCCA TAGACTGGTG TTAAATGTTG TCTACACTGC |
| 2101 | AAAATCCATG TTCTAACATA TGTAATAATT GCCAGGAGTA CAGTGCTCTT GTTGATCTTG |
| 2161 | TATTCAGTCA GGTTAAAACA ACGGACAATA AAAGAATGAA CCGAATTC |

GENBANK ID: U82535.1
VERSION U82535.1 GI:2149155
CDS 36..1775
/CODON_START=1
MVQYELWAALPGASGVALACCFVAAAVALRWSGRRTARGAVVRA
RQKQRAGLENMDRAAQRFRLQNPDLDSEALLALPLFQLVQKLHSRELAPEAVLFTYVG
KAWEVNKGTNCVTSYLADCETQLSQAPRQGLLYGVPVSLKECFTYKGQDSTLGLSLNE
GVPAECDSVVVHVLKLQGAVPFVHTNVPQSMFSYDCSNPLFGQTVNPWKSSKSPGGSS
GGEGALIGSGGSPLGLGTDIGGSIRFPSSFCGICGLKPTGNRLSKSGLKGCVYGQEAV
RLSVGPNARDVESLALCLRALLCEDMFRLDPTVPPLPFREEVYTSSQPLRVGYYETDN
YTMPSPAMRRAVLETKQSLEAAGHTLVPFLPSNIPHALETLSTGGLFSDGGHTFLQNF
KGDFVDPCLGDLVSILKLPQWLKGLLAFLVKPLLPRLSAFLSNMKSRSAGKLWELQHE
IEVYRKTVIAQWRALDLDVVLTPMLAPALDLNAPGRATGAVSYTMLYNCLDFPAGVVP
VTTVTAEDEAQMEHYRGYFGDINDKNLQKGMKKSVGLPVAVQCVALPWQEELCLRFMR
EVERLMTPEKQSS
GENBANK ID: NM_000789.1
DEFINITION HOMO SAPIENS DIPEPTIDYL CARBOXYPEPTIDASE 1 (ANGIOTENSIN I
CONVERTING ENZYME) (ACE), MRNA.
VERSION NM_000789.1 GI:4503272
CDS 23..3943

| | |
|---|---|
| 1 | GCCGAGCACC GCGCACCGCG TCATGGGGGC CGCCTCGGGC CGCCGGGGGC CGGGGCTGCT |
| 61 | GCTGCCGCTG CCGCTGCTGT TGCTGCTGCC GCCGCAGCCC GCCCTGGCGT TGGACCCCGG |
| 121 | GCTGCAGCCC GGCAACTTTT CTGCTGACGA GGCCGGGGCG CAGCTCTTCG CGCAGAGCTA |
| 181 | CAACTCCAGC GCCGAACAGG TGCTGTTCCA GAGCGTGGCC GCCAGCTGGG CGCACGACAC |
| 241 | CAACATCACC GCGGAGAATG CAAGGCGCCA GGAGGAAGCA GCCCTGCTCA GCCAGGAGTT |
| 301 | TGCGGAGGCC TGGGGCCAGA AGGCCAAGGA GCTGTATGAA CCGATCTGGC AGAACTTCAC |
| 361 | GGACCCGCAG CTGCGCAGGA TCATCGGAGC TGTGCGAACC CTGGGCTCTG CCAACCTGCC |
| 421 | CCTGGCTAAG CGGCAGCAGT ACAACGCCCT GCTAAGCAAC ATGAGCAGGA TCTACTCCAC |
| 481 | CGCCAAGGTC TGCCTCCCCA ACAAGACTGC CACCTGCTGG TCCCTGGACC CAGATCTCAC |
| 541 | CAACATCCTG GCTTCCTCGC GAAGCTACGC CATGCTCCTG TTTGCCTGGG AGGGCTGGCA |
| 601 | CAACGCTGCG GGCATCCCGC TGAAACCGCT GTACGAGGAT TTCACTGCCC TCAGCAATGA |
| 661 | AGCCTACAAG CAGGACGGCT TCACAGACAC GGGGGCCTAC TGGCGCTCCT GGTACAACTC |
| 721 | CCCCACCTTC GAGGACGATC TGGAACACCT CTACCAACAG CTAGAGCCCC TCTACCTGAA |
| 781 | CCTCCATGCC TTCGTCCGCC GCGCACTGCA TCGCCGATAC GGAGACAGAT ACATCAACCT |
| 841 | CAGGGGACGC ATCCCTGCTC ATCTGCTGGG AGACATGTGG GCCCAGAGCT GGGAAAACAT |
| 901 | CTACGACATG GTGGTGCCTT TCCCAGACAA GCCCAACCTC GATGTCACCA GTACTATGCT |
| 961 | GCAGCAGGGC TGGAACGCCA CGCACATGTT CCGGGTGGCA GAGGAGTTCT TCACCTCCCT |
| 1021 | GGAGCTCTCC CCCATGCCTC CCGAGTTCTG GGAAGGGTCG ATGCTGGAGA AGCCGGCCGA |
| 1081 | CGGGCGGGAA GTGGTGTGCC ACGCCTCGGC TTGGGACTTC TACAACAGGA AAGACTTCAG |
| 1141 | GATCAAGCAG TGCACACGGG TCACGATGGA CCAGCTCTCC ACAGTGCACC ATGAGATGGG |
| 1201 | CCATATACAG TACTACCTGC AGTACAAGGA TCTGCCCGTC TCCCTGCGTC GGGGGGCCAA |
| 1261 | CCCCGGCTTC CATGAGGCCA TTGGGGACGT GCTGGCGCTC TCGGTCTCCA CTCCTGAACA |
| 1321 | TCTGCACAAA ATCGGCCTGC TGGACCGTGT CACCAATGAC ACGGAAAGTG ACATCAATTA |
| 1381 | CTTGCTAAAA ATGGCACTGG AAAAAATTGC CTTCCTGCCC TTTGGCTACT TGGTGGACCA |
| 1441 | GTGGCGCTGG GGGGTCTTTA GTGGGCGTAC CCCCCCTTCC CGCTACAACT TCGACTGGTG |
| 1501 | GTATCTTCGA ACCAAGTATC AGGGGATCTG TCCTCCTGTT ACCCGAAACG AAACCCACTT |
| 1561 | TGATGCTGGA GCTAAGTTTC ATGTTCCAAA TGTGACACCA TACATCAGGT ACTTTGTGAG |
| 1621 | TTTTGTCCTG CAGTTCCAGT TCCATGAAGC CCTGTGCAAG GAGGCAGGCT ATGAGGGCCC |
| 1681 | ACTGCACCAG TGTGACATCT ACCGGTCCAC CAAGGCAGGG GCCAAGCTCC GGAAGGTGCT |
| 1741 | GCAGGCTGGC TCCTCCAGGC CCTGGCAGGA GGTGCTGAAG GACATGGTCG GCTTAGATGC |
| 1801 | CCTGGATGCC CAGCCGCTGC TCAAGTACTT CCAGCCAGTC ACCCAGTGGC TGCAGGAGCA |
| 1861 | GAACCAGCAG AACGGCGAGG TCCTGGGCTC GCCCGAGTAC CAGTGGCACC CGCCGTTGCC |
| 1921 | TGACAACTAC CCGGAGGGCA TAGACCTGGT GACTGATGAG GCTCAGGCCA CCAAGTTTGT |
| 1981 | GGAGGAATAT GACCGGACAT CCCAGGTGGT GTGGAACGAG TATGCCGAGG CCAACTGGAA |
| 2041 | CTACAACACC AACATCACCA CAGACACCAG CAAGATTCTG CTGCAGAAGA ACATGCAAAT |
| 2101 | AGCCAACCAC ACCCTGAAGT ACGGCACCCA GGCCAGGAAG TTTGATGTGA ACCAGTTGCA |
| 2161 | GAACACCACT ATCAAGCGGA TCATAAAGAA GGTTCAGGAC CTAGAACGGG CAGCGCTGCC |
| 2221 | TGCCCAGGAG CTGGAGGAGT ACAACAAGAT CCTGTTGGAT ATGGAAACCA CCTACAGCGT |
| 2281 | GGCCACTGTG TGCCACCCGA ATGGCAGCTG CCTGCAGCTC GAGCCAGATC TGACGAATGT |
| 2341 | GATGGCCACA TCCCGGAAAT ATGAAGACCT GTTATGGGCA TGGGAGGGCT GGCGAGACAA |
| 2401 | GGCGGGGAGA GCCATCCTCC AGTTTTACCC GAAATACGTG GAACTCATCA ACCAGGCTGC |
| 2461 | CCGGCTCAAT GGCTATGTAG ATGCAGGGGA CTCGTGGAGG TCTATGTACG AGACACCATC |
| 2521 | CCTGGAGCAA GACCTGGAGC GGCTCTTCCA GGAGCTGCAG CCACTCTACC TCAACCTGCA |
| 2581 | TGCCTACGTG CGCCGGGCCC TGCACCGTCA CTACGGGGCC CAGCACATCA ACCTGGAGGG |
| 2641 | GCCCATTCCT GCTCACCTGC TGGGGAACAT GTGGGCGCAG ACCTGGTCCA ACATCTATGA |
| 2701 | CTTGGTGGTG CCCTTCCCTT CAGCCCCCTC GATGGACACC ACAGAGGCTA TGCTAAAGCA |
| 2761 | GGGCTGGACG CCCAGGAGGA TGTTTAAGGA GGCTGATGAT TTCTTCACCT CCCTGGGGCT |
| 2821 | GCTGCCCGTG CCTCCTGAGT TCTGGAACAA GTCGATGCTG GAGAAGCCAA CCGACGGGCG |
| 2881 | GGAGGTGGTC TGCCACGCCT CGGCCTGGGA CTTCTACAAC GGCAAGGACT TCCGGATCAA |
| 2941 | GCAGTGCACC ACCGTGAACT TGGAGGACCT GGTGGTGGCC CACCACGAAA TGGGCCACAT |
| 3001 | CCAGTATTTC ATGCAGTACA AAGACTTACC TGTGGCCTTG AGGGAGGGTG CCAACCCCGG |
| 3061 | CTTCCATGAG GCCATTGGGG ACGTGCTAGC CCTCTCAGTG TCTACGCCCA AGCACCTGCA |
| 3121 | CAGTCTCAAC CTGCTGAGCA GTGAGGGTGG CAGCGACGAG CATGACATCA ACTTTCTGAT |
| 3181 | GAAGATGGCC CTTGACAAGA TCGCCTTTAT CCCCTTCAGC TACCTCGTCG ATCAGTGGCG |
| 3241 | CTGGAGGGTA TTTGATGGAA GCATCACCAA GGAGAACTAT AACCAGGAGT GGTGGAGCCT |
| 3301 | CAGGCTGAAG TACCAGGGCC TCTGCCCCCC AGTGCCCAGG ACTCAAGGTG ACTTTGACCC |
| 3361 | AGGGGCCAAG TTCCACATTC CTTCTAGCGT GCCTTACATC AGGTACTTTG TCAGCTTCAT |
| 3421 | CATCCAGTTC CAGTTCCACG AGGCACTGTG CCAGGCAGCT GGCCACACGG GCCCCCTGCA |
| 3481 | CAAGTGTGAC ATGTACCACT CCAAGGAGGC CGGGCAGCGC CTGGCGACCG CCATGAAGCT |
| 3541 | GGGCTTCAGT AGGCCGTGGC CGGAAGCCAT GCAGCTGATC ACGGGCCAGC CCAACATGAG |
| 3601 | CGCCTCGGCC ATGTTGAGCT ACTTCAAGCC GCTGCTGGAC TGGCTCCGCA CGGAGAACGA |
| 3661 | GCTGCATGGG GAGAAGCTGG GCTGGCCGCA GTACAACTGG ACGCCGAACT CCGCTCGCTC |
| 3721 | AGAAGGGCCC CTCCCAGACA GCGGCCGCGT CAGCTTCCTG GGCCTGGACC TGGATGCGCA |
| 3781 | GCAGGCCCGC GTGGGCCAGT GGCTGCTGCT CTTCCTGGGC ATCGCCCTGC TGGTAGCCAC |
| 3841 | CCTGGGCCTC AGCCAGCGGC TCTTCAGCAT CCGCCACCGC AGCCTCCACC GGCACTCCCA |
| 3901 | CGGGCCCCAG TTCGGCTCCG AGGTGGAGCT GAGACACTCC TGAGGTGACC CGGCTGGGTC |
| 3961 | GGCCCTGCCC AAGGGCCTCC CACCAGAGAC TGGGATGGGA ACACTGGTGG GCAGCTGAGG |

GENBANK ID: XM_052144.2
DEFINITION HOMO SAPIENS APOLIPOPROTEIN A-IV (APOA4), MRNA.
VERSION XM_052144.2 GI:15314431
CDS 114..1304
/CODON_START=1

| | |
|---|---|
| 1 | AGTTCCCACT GCAGCGCAGG TGAGCTCTCC TGAGGACCTC TCTGTCAGCT CCCCTGATTG |
| 61 | TAGGGAGGAT CCAGTGTGGC AAGAAACTCC TCCAGCCCAG CAAGCAGCTC AGGATGTTCC |
| 121 | TGAAGGCCGT GGTCCTGACC CTGGCCCTGG TGGCTGTCGC CGGAGCCAGG GCTGAGGTCA |
| 181 | GTGCTGACCA GGTGGCCACA GTGATGTGGG ACTACTTCAG CCAGCTGAGC AACAATGCCA |
| 241 | AGGAGGCCGT GGAACATCTC CAGAAATCTG AACTCACCCA GCAACTCAAT GCCCTCTTCC |
| 301 | AGGACAAACT TGGAGAAGTG AACACTTACG CAGGTGACCT GCAGAAGAAG CTGGTGCCCT |
| 361 | TTGCCACCGA GCTGCATGAA CGCCTGGCCA AGGACTCGGA GAAACTGAAG GAGGAGATTG |
| 421 | GGAAGGAGCT GGAGGAGCTG AGGGCCCGGC TGCTCCGCCA TGCCAATGAG GTGAGCCAGA |
| 481 | AGATGGGGGA CAACCTGCGA GAGCTTCAGC AGCGCCTGGA GCCCTACGCG GACCAGCTGC |
| 541 | GCACCCAGGT CAACACGCAG GCCGAGCAGC TGCGGCGCCA GCTGACCCCC TACGCACAGC |
| 601 | GCATGGAGAG AGTGCTGCGG GAGAACGCCG ACAGCCTGCA GGCCTCGCTG AGGCCCCACG |
| 661 | CCGACGAGCT CAAGGCCAAG ATCGACCAGA ACGTGGAGGA GCTCAAGGGA CGCCTTACGC |
| 721 | CCTACGCTGA CGAATTCAAA GTCAAGATTG ACCAGACCGT GGAGGAGCTG CGCCGCAGCC |
| 781 | TGGCTCCCTA TGCTCAGGAC ACGCAGGAGA AGCTCAACCA CCAGCTTGAG GGCCTGACCT |
| 841 | TCCAGATGAA GAAGAACGCC GAGGAGCTCA AGGCCAGGAT CTCGGCCAGT GCCGAGGAGC |
| 901 | TGCGGCAGAG GCTGGCGCCC TTGGCCGAGG ACGTGCGTGG CAACCTGAGG GGCAACACCG |
| 961 | AGGGGCTGCA GAAGTCACTG GCAGAGCTGG GTGGGCACCT GGACCAGCAG GTGGAGGAGT |
| 1021 | TCCGACGCCG GGTGGAGCCC TACGGGGAAA ACTTCAACAA AGCCCTGGTG CAGCAGATGG |
| 1081 | AACAGCTCAG GCAGAAACTG GGCCCCCATG CGGGGGACGT GGAAGGCCAC TTGAGCTTCC |
| 1141 | TGGAGAAGGA CCTGAGGGAC AAGGTCAACT CCTTCTTCAG CACCTTCAAG GAGAAAGAGA |
| 1201 | GCCAGGACAA GACTCTCTCC CTCCCTGAGC TGGAGCAACA GCAGGAACAG CAGCAGGAGC |
| 1261 | AGCAGCAGGA GCAGGTGCAG ATGCTGGCCC CTTTGGAGAG CTGAGCTGCC CCTGGTGCAC |
| 1321 | TGGCCCCACC CTCGTGGACA CCTGCCCTGC CCTGCCACCT GTCTGTCTGT CTGTCCCAAA |
| 1381 | GAAGTTCTGG TATGAACTTG AGGACACATG TCCAGTGGGA GGTGAGACCA CCTCTCAATA |
| 1441 | TTCAATAAAG CTGCTGAGAA TCTAGCCTC |

GENBANK ID: M29366.1
DEFINITION HUMAN EFIDERMAL GROWTH FACTOR RECEPTOR (ERBB3) MRNA, COMPLETE
CDS.
VERSION M29366.1 GI:181979
CDS 100..4128
/CODON_START=1

| | |
|---|---|
| 1 | ACCAATTCGC CAGCGGTTCA GGTGGCTCTT GCCTCGATGT CCTAGCCTAG GGGCCCCCGG |
| 61 | GCCGGACTTG GCTGGGCTCC CTTCACCCTC TGCGGAGTCA TGAGGGCGAA CGACGCTCTG |
| 121 | CAGGTGCTGG GCTTGCTTTT CAGCCTGGCC CGGGGCTCCG AGGTGGGCAA CTCTCAGGCA |
| 181 | GTGTGTCCTG GGACTCTGAA TGGCCTGAGT GTGACCGGCG ATGCTGAGAA CCAATACCAG |
| 241 | ACACTGTACA AGCTCTACGA GAGGTGTGAG GTGGTGATGG GGAACCTTGA GATTGTGCTC |
| 301 | ACGGGACACA ATGCCGACCT CTCCTTCCTG CAGTGGATTC GAGAAGTGAC AGGCTATGTC |
| 361 | CTCGTGGCCA TGAATGAATT CTCTACTCTA CCATTGCCCA ACCTCCGCGT GGTGCGAGGG |
| 421 | ACCCAGGTCT ACGATGGGAA GTTTGCCATC TTCGTCATGT TGAACTATAA CACCAACTCC |
| 481 | AGCCACGCTC TGCGCCAGCT CCGCTTGACT CAGCTCACCG AGATTCTGTC AGGGGGTGTT |
| 541 | TATATTGAGA AGAACGATAA GCTTTGTCAC ATGGACACAA TTGACTGGAG GGACATCGTG |
| 601 | AGGGACCGAG ATGCTGAGAT AGTGGTGAAG GACAATGGCA GAAGCTGTCC CCCCTGTCAT |
| 661 | GAGGTTTGCA AGGGGCGATG CTGGGGTCCT GGATCAGAAG ACTGCCAGAC ATTGACCAAG |
| 721 | ACCATCTGTG CTCCTCAGTG TAATGGTCAC TGCTTTGGGC CCAACCCCAA CCAGTGCTGC |
| 781 | CATGATGAGT GTGCCGGGGG CTGCTCAGGC CCTCAGGACA CAGACTGCTT TGCCTGCCGG |
| 841 | CACTTCAATG ACAGTGGAGC CTGTGTACCT CGCTGTCCAC AGCCTCTTGT CTACAACAAG |
| 901 | CTAACTTTCC AGCTGGAACC CAATCCCCAC ACCAAGTATC AGTATGGAGG AGTTTGTGTA |
| 961 | GCCAGCTGTC CCCATAACTT TGTGGTGGAT CAAACATCCT GTGTCAGGGC CTGTCCTCCT |
| 1021 | GACAAGATGG AAGTAGATAA AAATGGGCTC AAGATGTGTG AGCCTTGTGG GGGACTATGT |
| 1081 | CCCAAAGCCT GTGAGGGAAC AGGCTCTGGG AGCCGCTTCC AGACTGTGGA CTCGAGCAAC |
| 1141 | ATTGATGGAT TTGTGAACTG CACCAAGATC CTGGGCAACC TGGACTTTCT GATCACCGGC |
| 1201 | CTCAATGGAG ACCCCTGGCA CAAGATCCCT GCCCTGGACC CAGAGAAGCT CAATGTCTTC |
| 1261 | CGGACAGTAC GGGAGATCAC AGGTTACCTG AACATCCAGT CCTGGCCGCC CCACATGCAC |
| 1321 | AACTTCAGTG TTTTTTCCAA TTTGACAACC ATTGGAGGCA GAAGCCTCTA CAACCGGGGC |
| 1381 | TTCTCATTGT TGATCATGAA GAACTTGAAT GTCACATCTC TGGGCTTCCG ATCCCTGAAG |
| 1441 | GAAATTAGTG CTGGGCGTAT CTATATAAGT GCCAATAGGC AGCTCTGCTA CCACCACTCT |
| 1501 | TTGAACTGGA CCAAGGTGCT TCGGGGGCCT ACGGAAGAGC GACTAGACAT CAAGCATAAT |
| 1561 | CGGCCGCGCA GAGACTGCGT GGCAGAGGGC AAAGTGTGTG ACCCACTGTG CTCCTCTGGG |
| 1621 | GGATGCTGGG GCCCAGGCCC TGGTCAGTGC TTGTCCTGTC GAAATTATAG CCGAGGAGGT |
| 1681 | GTCTGTGTGA CCCACTGCAA CTTTCTGAAT GGGGAGCCTC GAGAATTTGC CCATGAGGCC |
| 1741 | GAATGCTTCT CCTGCCACCC GGAATGCCAA CCCATGGAGG GCACTGCCAC ATGCAATGGC |
| 1801 | TCGGGCTCTG ATACTTGTGC TCAATGTGCC CATTTTCGAG ATGGGCCCCA CTGTGTGAGC |
| 1861 | AGCTGCCCCC ATGGAGTCCT AGGTGCCAAG GGCCCAATCT ACAAGTACCC AGATGTTCAG |
| 1921 | AATGAATGTC GGCCCTGCCA TGAGAACTGC ACCCAGGGGT GTAAAGGACC AGAGCTTCAA |
| 1981 | GACTGTTTAG GACAAACACT GGTGCTGATC GGCAAAACCC ATCTCACAAT GGCTTTGACA |
| 2041 | GTGATAGCAG GATTGGTAGT GATTTTCATG ATGCTGGGCG GCACTTTTCT CTACTGGCGT |
| 2101 | GGGCGCCGGA TTCAGAATAA AAGGGCTATG AGGCGATACT TGGAACGGGG TGAGAGCATA |
| 2161 | GAGCCTCTGG ACCCCAGTGA GAAGGCTAAC AAAGTCTTGG CCAGAATCTT CAAAGAGACA |
| 2221 | GAGCTAAGGA AGCTTAAAGT GCTTGGCTCG GGTGTCTTTG GAACTGTGCA CAAAGGAGTG |
| 2281 | TGGATCCCTG AGGGTGAATC AATCAAGATT CCAGTCTGCA TTAAAGTCAT TGAGGACAAG |
| 2341 | AGTGGACGGC AGAGTTTTCA AGCTGTGACA GATCATATGC TGGCCATTGG CAGCCTGGAC |
| 2401 | CATCCCCACA TTGTAAGGCT GCTGGGACTA TGCCCAGGGT CATCTCTGCA GCTTGTCACT |
| 2461 | CAATATTTGC CTCTGGGTTC TCTGCTGGAT CATGTGAGAC AACACCGGGG GGCACTGGGG |
| 2521 | CCACAGCTGC TGCTCAACTG GGGAGTACAA ATTGCCAAGG GAATGTACTA CCTTGAGGAA |
| 2581 | CATGGTATGG TGCATAGAAA CCTGGCTGCC CGAAACGTGC TACTCAAGTC ACCCAGTCAG |
| 2641 | GTTCAGGTGG CAGATTTTGG TGTGGCTGAC CTGCTGCCTC CTGATGATAA GCAGCTGCTA |
| 2701 | TACAGTGAGG CCAAGACTCC AATTAAGTGG ATGGCCCTTG AGAGTATCCA CTTTGGGAAA |
| 2761 | TACACACACC AGAGTGATGT CTGGAGCTAT GGTGTGACAG TTTGGGAGTT GATGACCTTC |
| 2821 | GGGGCAGAGC CCTATGCAGG GCTACGATTG GCTGAAGTAC CAGACCTGCT AGAGAAGGGG |
| 2881 | GAGCGGTTGG CACAGCCCCA GATCTGCACA ATTGATGTCT ACATGGTGAT GGTCAAGTGT |
| 2941 | TGGATGATTG ATGAGAACAT TCGCCCAACC TTTAAAGAAC TAGCCAATGA GTTCACCAGG |
| 3001 | ATGGCCCGAG ACCCACCACG GTATCTGGTC ATAAAGAGAG AGAGTGGGCC TGGAATAGCC |
| 3061 | CCTGGGCCAG AGCCCCATGG TCTGACAAAC AAGAAGCTAG AGGAAGTAGA GCTGGAGCCA |
| 3121 | GAACTAGACC TAGACCTAGA CTTGGAAGCA GAGGAGGACA ACCTGGCAAC CACCACACIG |
| 3181 | GGCTCCGCCC TCAGCCTACC AGTTGGAACA CTTAATCGGC CACGTGGGAG CCAGAGCCTT |
| 3241 | TTAAGTCCAT CATCTGGATA CATGCCCATG AACCAGGGTA ATCTTGGGCA GTCTTGCCAG |
| 3301 | GAGTCTGCAG TTTCTGGGAG CAGTGAACGG TGCCCCCGTC CAGTCTCTCT ACACCCAATC |
| 3361 | CCACGGGGAT GCCTGGCATC AGAGTCATCA GAGGGGCATG TAACAGGCTC TGAGGCTGAG |
| 3421 | CTCCAGCAGA AAGTGTCAAT GTGTAGAAGC CCGAGCAGCA GGCGGAGGCG ACGGCCACGC |
| 3481 | GGAGATAGGG CCTACCATTC CCAGCGCCAC AGTCTGCTGA CTCCTGTTAC CCCACTCTCC |
| 3541 | CCACCCGGGT TAGAGGAAGA GGATGTCAAC GGTTATGTCA TGCCAGATAC ACACCTCAAA |
| 3601 | GGTACTCCCT CCTCCCGGGA AGGCACCCTT TCTTCAGTGG GTCTTAGTTC TGTCCTGGGT |
| 3661 | ACTGAAGAAG AAGATGAAGA TGAGGAGTAT GAATACATGA ACCGGAGGAG AAGGCACAGT |
| 3721 | CCACCTCATC CCCCTAGGCC AAGTTCCCTT GAGGAGCTGG GTTATGAGTA CATGGATGTG |
| 3781 | GGGTCAGACC TCAGTGCCTC TCTGGGCAGC ACACAGAGTT GCCCACTCCA CGCTGTACGC |
| 3841 | ATCATGCCCA CTGCAGGCAC AACTCCAGAT GAAGACTATG AATATATGAA TCGGCAACGA |
| 3901 | GATGGAGGTG GTCCTGGGGG TGATTATGCA GCCATGGGGG CCTGCCCAGC ATCTGAGCAA |
| 3961 | GGGTATGAAG AGATGAGAGC TTTTCAGGGG CCTGGACATC AGGCCCCCCA TGTCCATTAT |
| 4021 | GCCCGCCTAA AAACTCTACG TAGCTTAGAG GCTACAGACT CTGCCTTTGA TAACCCTGAT |
| 4081 | TACTGGCATA GCAGGCTTTT CCCCAAGGCT AATGCCCAGA GAACGTAACT CCTGCTCCCT |
| 4141 | GTGGCACTCA GGGAGCATTT AATGGCAGCT AGTGCCTTTA GAGGGTACCG TCTTCTCCCT |
| 4201 | ATTCCCTCTC TCTCCCAGGT CCCAGCCCCT TTTCCCCAGT CCCAGACAAT TCCATTCAAT |
| 4261 | CTTTGGAGGC TTTTAAACAT TTTGACACAA AATTCTTATG GTATGTAGCC AGCTGTGCAC |
| 4321 | TTTCTTCTCT TTCCCAACCC CAGGAAAGGT TTTCCTTATT TTGTGTGCTT TGCCAGTCGC |
| 4381 | ATTCCTCAGC TTCTTCACAG GCACTCCTGG AGATATGAAG GATTACTCTC CATATCCCTT |
| 4441 | CCTCTCAGGC TCTTGACTAC TTGGAACTAG GCTCTTATGT GTGCCTTTGT TTCCCATCAG |
| 4501 | ACTGTCAAGA AGAGGAAAGG GAGGAAACCT AGCAGAGGAA AGTGTAATTT TGGTTTATGA |
| 4561 | CTCTTAACCC CCTAGAAAGA CAGAAGCTTA AAATCTGTGA AGAAAGAGGT TAGGAGTAGA |
| 4621 | TATTGATTAC TATCATAATT CAGCACTTAA CTATGAGCCA GGCATCATAC TAAACTTCAC |
| 4681 | CTACATTATC TCACTTAGTC CTTTATCATC CTTAAAACAA TTCTGTGACA TACATATTAT |
| 4741 | CTCATTTTAC ACAAAGGGAA GTCGGGCATG GTGGCTCATG CCTGTAATCT CAGCACTTTG |
| 4801 | GGAGGCTGAG GCAGAAGGAT TACCTGAGGC AAGGAGTTTG AGACCAGCTT AGCCAACATA |
| 4861 | GTAAGACCCC CATCTCTTT |

GENBANK ID: X54686
VERSION X54686.1 GI:56909
MCTKMEQAFYHDDSYAAAGYGRSPGSLSLHDYKLLKPTLALNLA
DPYRGLEGPGARGPGPEGSGAGSYFSGQGSDTGASLKLASTELERLIVPNSNGVITTT
PTPPGQYPYPRGGGSGGGTGGGVTEEQEGFADGFVKALDDLQKMNHVTPPNVSLGASG
GPQAGPGGVYAGPEPPPVYTNLSSYSPASAPSGGSGTAVGTGSSYPTATISYLPHAPP
FAGGNPAQLGLSRGASAFKEEPQTVPEARSRDATPPVSPINMEDQERIKVERKRLRNR
LAATKCRKRKLERIARLEDKVKTLKAENAGLSSAAGLLREQVAQLKQKVMTHVSNGCQ
LLLGVKGHAF
GENBANK ID: D26307
VERSION D26307.1 GI:450471
METPFYGEEALSGLAAGASSVAGAAGAPGGGGPAPPGRAFPGAP
PTSSNLKKQALTLSLAEQGAAGLKPGSATAPSALRPDGAPDGLLASPDLGLLKLASPE
LERLIIQSNGLVTTTPTSTQFLYPKVAASEEQEFAEGFVKALEDLHKQSQLGAATAAT
SGAPAPPAPADLAATPGATETPVYANLSSFAGGAGPPGGAATVAFAAEPVPFPPPPGA
LGPPPPPHPPRLAALKDEPQTVPDVPSFGDSPPLSPIDMDTQERIKAERKRLRNRIAA
SKCRKRKLERISRLEEKVKTLKSQNTELASTASLLREQVAQLKQKVLSHVNSGCQLLP
QHQVPAY
GENBANK ID: NM_012747.1
VERSION NM_012747.1 GI:6981591
MAQWNQLQQLDTRYLEQLHQLYSDSFPMELRQFLAPWIESQDWA
YAASKESHATLVFHNLLGEIDQQYSRFLQESNVLYQHNLRRIKQFLQSRYLEKPMEIA
RIVARCLWEESRLLQTAATAAQQGGQANHPTAAVVTEKQQMLEQHLQDVRKRVQDLEQ
KMKVVENLQDDFDFNYKTLKSQGDMQDLNGNNQSVTRQKMQQLEQMLTALDQMRRSIV
SELAGLLSAMEYVQKTLTDEELADWKRRQQIACIGGPPNICLDRLENWITSLAESQLQ
TRQQIKKLEELQQKVSYKGDPIVQHRPMLEERIVDLFRNLMKSAFVVERQPCMPMHPD
RPLVIKTGVQFTTKVRLLVKFPELNYQLKIKVCIDKDSGDVAALRGSRKFNILGTNTK
VMNMEESNNGSLSAEFKHLTLREQRCGNGGRANCDASLIVTEELHLITFETEVYHQGL
KIDLETHSLPVVVISNICQMPNAMASILWYNMLTNNPKNVNFFTKPPIGTWDQVAEVL
SWQFSSTTKRGLSIEQLTTLAEKLLGPGVNYSGCQITWAKFCKENMAGKGFSFWVWLD
NIIDLVKKYILALWNEGYIMGFISKERERAILSTKPPGTFLLRFSESSKEGGVTPTWV
EKDISGKTQIQSVEPYTKQQLNNMSFAEIIMGYKIMDATNILVSPLVYLYPDIPKEEA
FGKYCRPESQEHPEADPGSAAPYLKTKFICVTPTTCSNTIDLPMSPRTLDSLMQFGNN
GEGAEPSAGGQFESLTFDMDLTSECATSPM
GENBANK
ID: L26267.1
VERSION L26267.1 GI:425471
REILNPPEKETQGEGPSLFMASTKTEAIAPASTMEDKEEDVGFQ
DNLFLEKALQLAKRHANALFDYAVTGDVKNLLAVQRHLTAVQDEN0DSVLHLAIIHLE
AQLVRDLLEVTSGSISDDIINMRNDLYQTPLHLAVITKQEDVVEDLLRVGADLSLLDR
WGNSVLHLAAKEGHDKILGVLLKNSKAALLINHPNGEGLNAIHIAVMSNSLSCLQLLV
AAGAEVNAQEQKSGRTALHLAVEYDNISLAGCLLLEGDALVDSTTYDGTTPLHIAAGR
GSTRLAALLKAAGADPLVENFEPLYDLDDSWEKAGEDEGVVPGTTFLDMAANWQVFDI
LNGKFYEFVFTSDDILPQGDIKQLTEDTRLQLCKLLEIFDPDKNNATLAQKLGLGILN
NAFRLSFAPSKTLMDNYEVSGGTIKELVEALRQMGYTEAIEVIQAAFRTPETTASSPV
TTAQAHLLPLSSSSTRQHIDELRDNDSVCDSGVETSFRKLSFSESLTGDGPLLSLNKM
FHNYGQDGPIEGKI
GENEANK ID:
M3435 6.1
VERSION M34356.1 GI:181042
MTMESGAENQQSGDAAVTEAENQQMTVQAQFQIATLAQVSMPAA
HATSSAPTVTLVQLPNGQTVQVHGVIQAAQFSVIQSPQVQTVQISTIAESEDSQESVD
SVTDSQKRREILSRRPSYRKILNDLSSDAFGVFRIEEEKSEEETSAFAITTVTVPTPI
YQTSSGQYIAITQGGAIQLANNGTDGVQGLQTLTMTNAAATQPGTTILQYAQTTDGQQ
ILVPSNQVVVQAASGDVQTYQIRTAPTSTIAFGVVMASSPALPTQPAEEAARKREVRL
MKNREAARECRRKKKEYVKCLENRVAVLENQNKTLIEELKALKDYCHKSD
GENBANK ID:
X68193.1
VERSION X68193.1 GI:53353
MANLERTFIAIKPDGVQRGLVGEIIKRFEQKGFRLVAMKFLRAS
EEHLEQEYIDLKDRPFFFGLVKYMNSGPVVAMVWEGLNVVKTGRVNLGETNPADSKFG
TIRGDFCIQVGRNIIHGSDSVESAEKEIHLWFKPEELIDYKSCAHDWVYE
GENBANK
ID: U29200.1
VERSION U29200.1 GI:924934
MANLERTFIAIKPDGVQR
GENBANK ID: L35572
VERSION L35572.1 GI:531219
MNVHCAGCERFILDRFLLNVLDRAWHIKCVQCCECKTNLSEKCF
SREGKLYCKNDFFRRFGTKCAGCAQGISPSDLVRKARSKVFHLNCFTCMVCNKQLSTG
EELYVIDENKFVCKDDYLSSSSLKEGSLNSVSSCTDRSLSPDLQDFLQDDPKETDNST
SSDKETANNENEEQNSGTKRRGFRTTIKAKQLETLKAAFAATFKFTRHIREQLAQETG
LNMRVIQVWFDNRRSKERRMKQLSALGARRHAFFRSPRRMRPLGGRLDESEMLGSTPY
TYYGDYGSDYVAPGGNYDFFAHGPPSQAQSPADSSFLAASGPGSTPLGALEPPLAGPH
GADNPRFTDMISHPDTPSPEPGLPGALHPNPGEVFSGGPSPPFPMSGTSGY5GPLSHP
NPELNEAAVW
GENBANK ID: X55787.1
VERSION X55797.1 GI:296022
MKAAVDLKPTLTIIKTEKVDLELFPSPENECADVPLSTPSSKEM
MSQALKSYFSGFTKEQQRRGIPKDPRQWTDTHVRDWVMAVNEFSLKGVDFHKFCMSG
AAVCALGKECFLELAPDFVGDILWEELEILQKEDVKPYQVNGANPTYPESCYTSVYFI
SYGIEHAQCVPPSEFSEPSFITESYQTLHPISSEELLSLKYENDYPSVILRDPLQTET
LQTDYFRIKQEVLTPNNMCLGRASRGKLGGQDSFESVESYDSCDRLTQSWSSQSSFNS
LQRVPSYDSFDYEDYPAALPNHKPKGTFKDYVRDRADLNKDKPVIPAAALAGYTGSGP
IQLWQFLLELLTDKSCQSFISWTGDCNEFKLSDPDEVARRWGKRKNKPSMNYEKLSRA
LRYYYDKNIIHKTAGNAYVYAFVCDLQSLLGYTPEELHAMLDVKPDAD
GENBANK ID: M11507.1
DEFINITION Human transferrln receptor
VERSION M11507.1 GI:339515
MMDQARSAFSNLFGGEFLSYTRFSLARQVDGDNSHVENKLAVDE
EENADNNTKANVTKPKRCSGSICYCTIAVIVFFLIGFMIGYLGYCKGVEPKTECERLA
GTESPVREEFGEDFFAARRLYWDDLKRKLSEKLQSTDFTSTIKLLNENSYVPREAGSQ
KDENLALYVENQFREFKLSKVWRDQHFVKTQVKDSAQNSVIIVDKNGRLVYLVENPGG
YVAYSKAATVTCKLVHANFGTKKDFEDLYTPVNCSTVIVRAGKITFAEKVPNAESLNA
IGVLIYMDQTKFFIVNAELSFFGHAHLGTGDPYTPGFPSFNHTQFPPSRSSGLPNIPV
QTISRAAAEKLFGNMEGDCPSDWKTDSTCRMVTSESKNVKLTVSNVLKEIKILNIFGV
IKCFVEPDNYVVVGAQRDAWGP0AAKSGVGTALLLKLAQMFSDNVLKQGFQFSRSIIF
ASWSAGDFGSVGATEWLEGYLSSLHLKAFTYINLDKAVLGTSNFKVSASPLLYTLIEK
TMQNVKHPVTGQFLYQDSNWASKVEKLTLDNAAFPFLAYSGIPAVSFCFCEDTDYPYL
GTTMDTYKELIERIPELNKVARAAAEVAGQFVIKLTHDVELNLDYERYNSQLLSFVRD
LNQYRADIKEMGLSLQWLYSARGDFFPATSRLTTDFGNAEKTDRFVMKKLNDRVMRVE
YHFLSPYVSPKESPFRHVFWGSGSHTLPALLENLKLRKQNNCAFNETLFRNQLALATW
TIQGAANALSGDVWDIDNEF
GENBANK ID: AAA60255
VERSION AAA60255.1 GI:190927

| | |
|---|---|
| 1 | mteyklvvvg aggvgksalt iqllqnhfvd eydptledsy rkqvvidget clldildtag |
| 61 | qeeysamrdq ymrtgegflc vfainnsksf adlnlyreqi krvkdsddvp mvlvgnkcdl |
| 121 | ptrtvdtkqa helaksygip fietsaktrq gvedafytlv reirqyrmkk lnssddgtgg |
| 181 | cmglpcvvm |

GENBANK ID: AAB38309
VERSION AAB38309.1 GI:1497931

| | |
|---|---|
| 1 | mslvlndlli ccrqlehdra terkkevekf krllrdpeti khldrhsdsk qgkylnwdav |
| 61 | frflqkyiqk eteclrlakp nvsastqasr qkknqeissl vkytikcanr raprlkcqel |
| 121 | lnyimdtvkd ssngalygad csnhllkdil svrkywceis qqqwlelfsv yfrlylkpsq |
| 181 | dvhrvlvari ihavtkgccs qtdglnskkfl dffskaiqca rqeksssgln hilaaltifi |
| 241 | ktlavnfrir vcelgdeilp tllyiwtqhr lndslkevii elfqlqiyih hpkgaktqek |
| 301 | gayestkwrs ilynlydllv neishlgsrg kyssgfrnia vkenllelma dichqvfned |
| 361 | trslelsqsy tttqressdy svpckrkkie lgwevikdhl qksqndfdlv pwlqiatqli |
| 421 | skypaslpnc elspllmils qllpqqrhge rtpyvlrclt evalcqdkrs nlessqksdl |
| 481 | lklwnkiwci tfrgisseqi qaenfgllga iiqgslvevd refwklftgs acrpscpavc |
| 541 | cltlalttsi vpgtvkmgie qnmcevnrsf slkesimkwl ltyqlegdle nstevppilh |
| 601 | snfphlvlek ilvslomknc kaamnffqsv pecehhqkdk eelsfsevee lflqttfdkm |
| 661 | dfltivrecg iekhqssigf svhqnlkesl drcllglseq llnnysseit nsetlvrcsr |
| 721 | llvgvlgcyc ymgviaeeea ykselfqkak slmqcaqesi tlfknktnee trigslrnmm |
| 781 | qlctrclsnc tkkspnkias gfflrlltsk lmndiadick slasflkkpf firgevesmed |
| 841 | dtngnlmeve dgssmnlfnd ypdssvsdan epgesqstig ainplaeeyl skgdllfldm |
| 901 | lkflclcvtt aqtntvsfra adirrkllml idsstleptk sihihmylmi lkelpgeeyp |
| 961 | lpmedvlell kplsnvcsly rrdqdvckti lnhvlhvvkn lgqsnmdsen trdaqgqflt |
| 1021 | vigafwhltk erkyifsvrm alvnclktll eadpyskwai lnvmgkdfpv nevftqflad |
| 1081 | nhhqvrmlaa esinrlfqdt kgdssrllka lplklqqtaf enaylkaqeg mremshsaen |
| 1141 | petldeiynr ksvlltliav vlscapicek qalfalcksv kenglephlv kkvlekvset |
| 1201 | fgyrrledfm ashldylvle wlnlqdteyn lsstpfilln ytniedtyrs cykvliphlv |
| 1261 | irshfdevks ianqigedwk slltdcfpki lvnilpytay egtrdsgmaq qretatkvyd |
| 1321 | mlksenllgk qidhitisni peivvellmt lhepanssas qstdlcdfsg dldpapnpph |
| 1381 | fpshvlkatf ayisnchktk ikaileilak spdsyqkill aiceqaaetn nvykkhrilk |
| 1441 | iyhlfvslll kdiksglgga watvlrdviy tlihylnqrp scimdvslrs fslccdllsq |
| 1501 | vcqtavtyck dalenhlhvl vgtliplvye qvevqkqvld llkylvidnk dnenlyitik |
| 1561 | lldpfpdhvv fkdlrltqqk ikysrgpfsl leeinhflsv svydalplcr leglkdlrrq |
| 1621 | lelhkdqmvd inrasqdnpq dglmvklvvn llqlskmain htgekevlea vgsclgevgp |
| 1681 | idfstiaiqh skdasytkal kltedkelqw tfimltylnn tlvedcvkvr saavtclkni |
| 1741 | latktghsfw eiykmttdpm laylqpfrts rkkflevprf dkenpfegld dinlwiplse |
| 1801 | nhdiwiktlt cafldsggtk ceilqllkpm cevktdfcqt vlpylihdil lqdtneswrn |
| 1861 | llsthvqgff tsclrhfsqt srsttpanld sesehffrcc ldkksgrtml avvdymrrqk |
| 1921 | rpssgtifnd atwldinyle vakvaqscaa hftallyaei yadkksmddq ekrslateeg |
| 1981 | sqsttissls ekskeetgis lqdllleiyr sigepdslyg cgggkmlqpi trlrtyehea |
| 2041 | mwgkalvtyd letaipsstr qagiiqalqn igichilavy lkgldyenkd wcpeleelhy |
| 2101 | qaawrnmqwd hctsvskeve gtsyheslyn alqslrdref stfyeslkya rvkeveemck |
| 2161 | rslesvysly ptlsrlqaig elesigelfs rsvthrqlse vyikwqkhsq llkdsdfsfq |
| 2221 | epimalrtvi leilmekemd nsqrecikdl ltkhlvelsi lartfkntql peralfqikq |
| 2281 | ynsvscgvse wqleeaqvfw akkeqslals ilkqmikkld ascaannpsl kltyteclrv |
| 2341 | cgnwlaetcl enpavimqty lekavevagn ydgessdelr ngkmkaflsl arfsdtqyqr |
| 2401 | ienymkssef enkqallkra keevgllreh klqtnrytvk vqreleldel alralkedrk |
| 2461 | rflckaveny incllsgeeh dmwvtrlcsl wlensgvsev ngmmkrdgmk iptykflplm |
| 2521 | yqlaarmgtk mmgglgfhev lnnlisrism dhphhtlfii lalananrde fltkpevarr |
| 2581 | sritknvpkq ssqldedrte aanrilctir srrpqmvrsv ealcdayill anldatqwkt |
| 2641 | qrkginipad qpitklknle dvvvptmeik vdhtgeygnl vtiqsfkaet rlaggvnlpk |
| 2701 | iidcvgsdgk errqlvkgrd dlrqdavmgq vfqmcntllq rntetrkrkl tictykvvpl |
| 2761 | sqrsgvlewc tgtvpigefl vnnedgahkr yrpndfsafq cqkkmmevqk ksfeekyevf |
| 2821 | mdvcqntqpv fryfcmekfl dpaiwfekrl aytrsvatss ivgyilglgd rhvqniline |
| 2881 | qsaelvhidl gvafeqgkil ptpetvpfrl trdivdgmgl tgvegvfrrc cektmevmrn |
| 2941 | sqetlitlve vllydplfdw tmnplkalyl qqrpedetel hptlnaddqe ckrnlsdidq |
| 3001 | sfdkvaervl mrlqeklkgv eegtvlsvgg qvnlliqqai dpknlsrlfp gwkawv |

GENBANK ID: AAA59145.1
VERSION AAA59145.1 GI:307058

| | |
|---|---|
| 1 | mlkpslpfts llflqlpllg vglnttiltp ngnedttadf flttmptdsl svstlplpev |
| 61 | qcfvfnveym nctwnsssep qptnltlhyw yknsdndkvq kcshyltsee itsgcqlqkk |
| 121 | eihlyqtfvv qlqdpreprr qatqmlklqn lvipwapenl tlhklsesql elnwnnrfln |
| 181 | hclehlvqyr tdwdhswteq svdyrhkfsl psvdgqkryt frvrsrfnpl cgsaqhwsew |
| 241 | shpihwgsnt skenptlfal eavvisvgsm gliisllovy fwlertmpri ptlknledlv |
| 301 | teyhgnfsaw sgvskglaes lqpdyserlc lvseippkgg algegpgasp cnqhspywap |
| 361 | pcytlkpet |

GENBANK ID: AAC50825.1
VERSION AAC50825.1 GI:1117984

| | |
|---|---|
| 1 | mvaprplrrv vlfyggklcs magnfwqssh ylqwildkqd llkerqkdlk flseeeywkl |
| 61 | qifftnviqa lgehlklrqq viatatvyfk rfyaryslks idpvlmaptc vflaskveef |
| 121 | gvvsntrlia aatsvlktrf syafpkefpy rmnhilecef yllelmdccl ivyhpyrpll |
| 181 | qyvqdmgged mllplawriv ndtyrtdlcl lyppfmiala clhvacvvqq kdarqwfael |
| 241 | svdmekilei irvilklyeq wkntderkem atilskmpkp kpppnsegeq gpngsqnssy |
| 301 | sqs |

GENBANK ID: AAC50473.1
VERSION AAC50473.1 GI:1314346

| | |
|---|---|
| 1 | mamssggsgg gvpeqedsvl frrgtgqsdd sdiwddtali kaydkavasf khalkngdic |
| 61 | etsgkpkttp krkpakknks qkkntaaslq qwkvgdkcsa iwsedgciyp atlasidfkr |
| 121 | etcvvvytgy gnreeqnlsd llspicevan nleqnaqene nesqvstdes ensrspgnks |
| 181 | dnikpksapw nsflpppppm pgprlgpgkp glkfngpppp pppppphlls cwlppfpsgp |
| 241 | piipppppic pdslddadal gsmliswyms gyhtgyymgf rqnqkegrcs hsln |

GENBANK ID: CAC15525
VERSION CAC15525.1 GI:11137517

| | |
|---|---|
| 1 | mvsrdqahlg pkyvglwdtk srtdeelsfr agdvfhvark eeqwwwatll deaggavaqg |
| 61 | yvphnylaer etvesepwff qcisrseavr rlqaegnatg aflirvsekp sadyvlsvrd |
| 121 | tqavrhykiw rraggrlhln eavsflslpe lvnyhraqsl shglrlaapc rkhepeplph |
| 181 | wddwerpree ftlcrklgsg yfgevfeglw kdrvqvaikv isrdnllhqq mlqseiqamk |
| 241 | klrhkhilal yavvsvgdpv yiltelmakg sllellrdsd ekvlpvsell diawqvaegm |
| 301 | cylesqnyih rdlaarnilv gentlckvgd fglarliked vylshdhnip ykwtapeals |
| 361 | rghystksdv wsfglllhem fsrgqvpypg msnheaflrv dagyrmpcpl ecppsvhklm |
| 421 | ltcwcrdpeq rpcfkalrer lssftsyenp t |

GENBANK ID: AAB84296
VERSION AAB84296.1 GI:2613135

| | |
|---|---|
| 1 | tsttvrglna strylfrvra svqqigdwsn tveettlglq saspvqesrv aedgldqqlv |
| 61 | iavvgsvsat cltiiaalla lvclrrsclh rrhtftyqsg sgeetilqfs sgtltltrrp |
| 121 | kpqpeplsyp vle |

GENBANK ID: X63594.1
VERSION X63594.1 GI:57673
MFQPAGHGQDWANEGPRDGLKKERLVDDRHDSGLDSNKDEDYEQ
MVKELREIRLQFQEAPLAAEPWKQQLTEDGDSFLHLAIIHEEKTLTMEVIGQVKGDLA
FLNFQNNLQQTPLHLAVITNQPGIAEALLKAGCDPELRDFRGNTPLHLACEQGCLASV
AVLTQTCTPQHLHSVLQATNYNGHTCLHLASIHGYLGIVEHLVTLGADVNAQEPCNGR
TALHLAVDLQNPDLVSLLLKCGADVNRVTYQGYSPYQLTWGRPSTRIQQQLGQLTLEN
LQTLPESEDEESYDTESEFTEDELPYDDCVFGGQRLTL
GENBANK ID: AAB60641
VERSION AAB60641.1 GI:516515

| | |
|---|---|
| 1 | meqqdqsmke gmgttwllst pqhwlmqqfy netyygrtge fmedfpltll wsvtvsmfpf |
| 61 | ggfigsllvg plvnkfgrkg allfnnifsi vpailmgcsr vatsfeiiii srllvgicag |
| 121 | vssnvvpmyl gelapknlrg algvvpqlfi tvgilvaqif glrnllanvd gwpillgltg |
| 181 | vgaalqllll pffpespryl liqkkdeaaa kkalqtlrgw dsvdrevaei rqedeaekaa |
| 241 | gfisvlklfr mrslrwqlls iivlmggqql sgvnaiyyya dqiylsagvp eehvqyvtag |
| 301 | tgavnvvmtf cavfvvellg rrlllllgfs icliaccvlt aalalgdtvs wmpyisivcv |
| 361 | isyvlghaig pspipallit eiflqssrps afmvggsvhw lsnftvglif pfiqeglgpy |
| 421 | sfivfavic1 lttiyifliv petkaktfie ingiftkmnk vsevypekee lkelppvtse |
| 481 | q |

GENEANK ID: M29069
VERSION M29069.1 GI:205553
MLSCTTSTMPGMICKNSDLEFDSLKFCFYPEDDDIYFGGRNSTP
PGEDIWKKEELLPTFRLSPGRALAEDSLEPANMATEMLLFEADLWSNPAEEEDIFGLK
GLSGSSSNPVVLQDCMWSGFSSREKPETVVSEKLPGGCGSLAVGAGTLVPGAAAATSA
GHARSGTAGVGRRKAAWLTELSHLDSECVDSAVIFFANKRESMPVATIPASAGPAISL
GDHQGLSSSLEDFLSNSGYVEEGGEEIYVVMLGETQFSKTVTKLPTAAHSENAALTPE
CAQSGELILKRSDLIQEDHNYAAFPLPYAEDARPLKKPRSQDPLGPLKCVLRPKAPRL
RSRSNSDLEDIERRRNHNRMERQRRDIMRSSFLNLRDLVPELVHNEKAAKVVILKKAT
EYIHTLQTDESKLLVEREKLYERKQQLLEKIKQSAVC
GENBANK ID: M29039.1
VERSION M29039.1 GI:186626
MCTKMEQPFYHDDSYTATGYGRAPGGLSLHDYKLLKPSLAVNLA
DFYRSLKAPGARGPGPEGGQGGSYFSGQGSDTGASLKLASSELERLIVFNSNGVITTT
PTPPGQYFYPRGGGSGGGAGGAGGGVTEEQEGFADGFVKALDDLHKMNMVTPFNVSLG
ATGGPPAGPGGVYAGPEPPPVYTNLSSYSPASASSGGAGAAVGTGSSYPTTTISYLPH
APPFAGGHPAQLGLGRGASTFKEEPQTVFEARSRDATPPVSPINMEDQERIKVERKRL
RNRLAATKCRKRKLERIARLEDKVKTLKAENAGLSSTAGLLREQVAQLKQKVNTMVSN
GCQLLLGVKGHAF
GENBANK ID: X56681.1
VERSION X56681.1 GI:34018
METPFYGDEALSGLGGGASGSGGTFASPGRLFPGAPPTAAAGSM
MKKDALTLSLSEQVAAALKPAPAPASYPPAADGAPSAAPPDGLLASPDLGLIKLASPE
LERLIIQSNGLVTTTFTSSQFLYFKVAASEEQEFAEGFVKALEDLHKQNQLGAGRAAA
AAAAAAGGPSGTATGSAPPGGELAPAAAAPEAPVYANLSSYAGAGGAGGAATVAFAAE
PVPFPPPPPPGALGFFRLAALKDEPQTVFDVFSFGESFFLSFIDMDTQERIKAERKRL
RNRIAASKCRKRKLERISRLEEKVKTLKSQNTELASTASLLREQVAQLKQKVLSMVNS
GCQLLPQHQVPAY
GENBANK ID: NM_003150.1
VERSION NM_003150.1 GI:4507252
MAQWNQLQQLDTRYLEQLHQLYSDSFFMELRDFLAFWIESQDWA
YAASKESHATLVFHNLLGEIDQQYSRFLQESNVLYGHNLRRIKQFLQSRYLEKFMEIA
RIVARCLWEESRLLQTAATAAQQGGQANMFTAAVVTEKQQMLEQHLQDVRKRVQQLEQ
KMKVVENLQDDFDFNYKTLKSQGDMQDLNGNNQSVTRQKMQQLEQMLTALDQMRRSIV
SELAGLLSAMEYVQKTLTGEELADWKRRQQIACIGGFFNICLDRLENWITSLAESQLQ
TRQQIKKLEELHQKVSYKGDFIVQHRFMLEERIVVELFRNLMKSAFWERQFCMFMHPD
RPLVIKTGVQFTTKVRLLVKFFELNYQLKIKVCIDKDSGDVAALRGSRKFNILGTNTK
VMNMEESNNGSLSAEFKHLTLREQRCGNGGRANCDASLIVTEELHLITFETEVYHQGL
KIDLETMSLSVVVISNICQMFNAWASILWYNMLTNNFKNVNFFTKPPIGTWDGVAEVL
SWQFSSTTKRGLSIEQLTTLAEKLLGFGVNYSGCQITWANFCKENNAGKGESYMVMLD
NIIDLVKKYILALWNEGYIMGFISKEREFAILSTKFFGTELLRESESSKEGGVTETMV
EKDISGKTQIQSVEFYTKQQLNNMSFAEIIMGYKIMDATNILLSFLVYLYFDIPKEEA
FGKYCRFESGEHFEADFGSAAFYLKTKFICVTPTTCSNTIDLPMSPRALDSLMQFGNN
GEGAEPSAGGQFESLTFDMELTSECATSPM

1. A method of increasing the levels of a protein in a Peyer's patch cell, said method comprising delivering to said cell a nucleic acid coding for a protein, wherein absent said increase, the levels of said protein or its mRNA is greater than in a non-Peyer's patch cell.

2. The method of claim 1 wherein the protein is a transcription factor or a protein that activates a transcription factor.

3. The method of claim 2 wherein the transcription factor or a protein that activates a transcription factor is selected from the group consisting of Jun-B; c-jun related TF, Jun-D; c-jun related TF, STAT 3-signal transducer and activator of transcription 3, NF-kappaβ Tf p105 subunit, S-myc proto-oncogene; myc related, Nm23-M2; nucleoside diphosphate kinase B; metastasis reducing protein, and C-est-l proto-oncogene; p54.

4. The method of claim 1 wherein the protein is a receptor, or cell surface antigen,

5. The method of claim 4 wherein the protein is a receptor or a transporter.

6. The method of claim 1 wherein the protein is selected from the group consisting of nucleoside diphosphate kinases and member of the 14-3-3 family.

7. The method of claim 1 wherein the protein is coded for by a gene with an expression Fold Change denoted by a **, *, or number greater than 2.00 in Tables 2 or 3.

8. The method of claim 1 wherein the nucleic acid coding for at least 2 proteins is delivered, each of said proteins coded for by a gene with an expression Fold Change denoted by a **, *, or number greater than 2.00 in Tables 2 or 3.

9. The method of claim 1 wherein the cell to which the nucleic acid is delivered is a human cell.

10. The method of claim 9 wherein the cell is in a Peyer's patch in a human and the nucleic acid is delivered by the oral route.

11. The method of claim 9 wherein the cell is not within the body of a human.

12. The method of claim 1 wherein the cell to which the nucleic acid is delivered is a rat cell.

13. The method of claim 1 wherein a nucleic acid coding for a tumor antigen or foreign peptide is also delivered to the Peyer's patch cell.

14. The method of claim 13 wherein the cell to which the nucleic acid is delivered is a human cell.

15. A method of decreasing the levels of a protein in a Peyer's patch cell, said method comprising delivering to said cell an anti-sense nucleic acid molecule, a ribozyme nucleic acid molecule, an RNA interference nucleic acid molecule (RNAi), said anti-sense molecule, ribozyme or RNAi nucleic acid being complementary to a sequence of at least 10 nucleotides of the mRNA for said protein, wherein absent said anti-sense molecule, ribozyme or RNAi nucleic acid, the levels of said protein or its mRNA is less than in a non-Peyer's patch cell.

16. The method of claim 15 wherein the anti-sense nucleic acid, a ribozyme nucleic acid molecule, an RNA interference nucleic acid molecule is complementary to a sequence of at least 15 nucleotides of the mRNA of the protein.

17. The method of claim 16 wherein the anti-sense nucleic acid, a ribozyme nucleic acid molecule, an RNA interference nucleic acid molecule is complementary to a sequence of at least 30 nucleotides of the mRNA of the protein.

18. The method of claim 15 wherein the protein is coded for by a gene with an expression Fold Change denoted by a “−”, or a number less that 0.5 in Tables 2 or 3.

19. The method of claim 15 comprising delivering to said cell anti-sense nucleic acid molecules, ribozyme nucleic acid molecules, RNA interference nucleic acid molecules, said anti-sense, ribozyme or RNAi nucleic acid being complementary to a sequence of at least 10 nucleotides of the mRNA for at least 5 different protein a, wherein absent said anti-sense, ribozyme or RNAi nucleic acid molecule, the levels of each of said proteins or its mRNA is less than in a non-Peyer's patch cell.

20. A method of decreasing the levels of a protein in a Peyer's patch cell, said method comprising delivering to said cell an anti-sense nucleic acid molecule, a ribozyme nucleic acid molecule, an RNA interference nucleic acid molecule said anti-sense, ribozyme or RNAi nucleic acid forming a double-stranded molecule with part or all of the mRNA for said protein, wherein absent said anti-sense, ribozyme or RNAi nucleic acid molecule, the levels of said protein or its mRNA is less than in a non-Peyer's patch cell.

21. A method of claims 1, 13, or 15 in which the Peyer's patch cell is an M cell.

22. A human cell to which the method of claims 1 has been applied, or the progeny of said human cell.

23. A human cell to which the method of claim 13 has been applied, or the progeny of said human cell.

24. A human cell to which the method of claim 15 has been applied, or the progeny of said human cell.

25. A human cell to which the method of claims 1 has been applied, or the progeny of said human cell.

26. A human cell to which the method of claim 13 has been applied, or the progeny of said human cell.

27. A human cell to which the method of claim 15 has been applied, or the progeny of said human cell.

28. A method for enhancing transport of a drug through the gastrointestinal tract, said method comprising orally administering said drug in a composition that comprises a transport-enhancing protein, said transport-enhancing protein selected from the group consisting of human serum albumin (HSA), clusterin, T-cell surface glycoprotein CD5 precursor, HSP84, and Ca2+pla2, or a homolog that has at least 80% amino acid identity with said transport-enhancing protein over a length of said transport-enhancing protein identical to the homolog.

29. A method of claim 28 wherein the homolog has at least 90% amino acid with the transport-enhancing protein over a length of the transport-enhancing protein identical to the homolog.

30. A method of claim 28 wherein the transport-enhancing protein is selected from the group consisting of human serum albumin (HSA), clusterin, T-cell surface glycoprotein CD5 precursor, HSP84, and Ca2+ pla2.

31. A method to facilitate intracellular trafficking of an antigen that has been orally delivered by itself or as part of a composition or particle, said method comprising administering a protein selected from the group consisting of calreticulin, rab family proteins and ribosomal proteins.

32. A chimeric protein comprising the amino acid sequence for calreticulin, rab family proteins and ribosomal proteins and the amino acid sequence for a second polypeptide.

33. A method of administering a polypeptide, where said polypeptide is part of a chimeric protein of claim 32, and wherein said chimeric protein is orally administered.

34. A method of delivering a vaccine to a target cell, said method comprising utilizing as the target cell a Peyer's patch cell in which a normally upregulated protein or mRNA is further upregulated.

35. A method of claim 34 wherein the Peyer's patch cell is an M Cell.

36. A method of claim 1 wherein the protein is selected from the group consisting of clusterin, T-cell surface gicoprotein CD5 precursor, HSP84, Ca2+ dependent phospholipase A2 precursor, and the ribosomal proteins, S12, S11, L12, L11, S29, S19, L21, L19, L13, L44, and L36.

37. A method of claim 34 wherein the upregulated protein is selected from the group consisting of clusterin, T-cell surface glycoprotein CD5 precursor, HSP84, and Ca2+ dependent phospholipase A2 precursor and the mRNA is for a protein selected from said group.

38. A method of claim 1 wherein the protein is selected from the group consisting of cyclin D1, PLC-L, GRB2, ERK3/MAPK6, ERK1, ERK3, JNK2, CD40, CRAF1, C-MYC, PT-α, IL-R, CD40, C-MYC, PKC-α, GSTA1, GATA-2, PLGF, ezrin, HGF activator, hepatocyte growth factor-like protein, NCAD, MNDA, LHX1, TIE-1, NCAML1, CD104, CD44, SRC1, NMDA, TKT, ephrin (type A), Sp1, RAB proteins, PKC, TIR, Jak3, EGR-1, TNK1, CAMK IV, HSP40, HSP70, HSP60, HSO27, fMLP-related receptor, HSP27, glutaredoxin, CREB, gadd153, XPG, XPD, ubiqitin-conjugating enzyme, RAD23, cadherin 2, neural cell adhesion molecule, integrin alpha 3, leukocyte adhesion glycoprotein p150, integrin beta 4, TIE, NCAML1, α3β1 integrin, CD11C antigen, CD104 antigen, CD44, NMDA, TKT, ephrin (type A), and Sp1, a RAB protein, PKC, TfR, bcl-x and caspase-9.

39. A method of claim 34 wherein the upregulated protein is selected from the group consisting of cyclin D1, PLC-L, GRB2, ERK3/MAPK6, ERK1, ERK3, JNK2, CD40, CRAF1, C-MYC, PT-α, IL-R, CD40, C-MYC, PKC-α, GSTA1, GATA-2, PLGF, ezrin, HGF activator, hepatocyte growth factor-like protein, NCAD, MNDA, LHX1, TIE-1, NCAML1, CD104, CD44, SRC1, NMDA, TKT, ephrin (type A), Sp1, RAB proteins, PKC, TIR, Jak3, EGR-1, TNK1, CAMK IV, HSP40, HSP70, HSP60, HSO27, fMLP-related receptor, HSP27, glutaredoxin, CREB, gadd153, XPG, XPD, ubiqitin-conjugating enzyme, RAD23, cadherin 2, neural cell adhesion molecule, integrin alpha 3, leukocyte adhesion glycoprotein p150, integrin beta 4, TIE, NCAML1, α3β1 integrin, CD11C antigen, CD104 antigen, CD44, NMDA, TKT, ephrin (type A), and Sp1, a RAB protein, PKC, TfR, bcl-x and caspase-9. and the mRNA is for a protein selected from said group.

40. A method of claim 1 wherein the protein is selected from the group consisting of an 1 L-2 receptor, a gamma c chain of an IL-2 receptor, intereron-γ, and a C-C chemokine.

41. A method of claim 34 wherein the upregulated protein is selected from the group consisting of an IL-2 receptor, a gamma c chain of an IL-2 receptor, intereron-γ, and a C-C chemokine and the mRNA is for a protein selected from said group.

42. A method of claim 1 wherein the protein is selected from the group consisting of cyclin D1, PLC-L, GRB2, ERK3/MAPK6, ERK1, ERK3, PKC-α, GSTA1, GATA-2, and PLGF.

43. A method of claim 34 wherein the upregulated protein is selected from the group consisting of cyclin D1, PLC-L, GRB2, ERK3/MAPK6, ERK1, ERK3, JNK2, CD40, CRAF1, C-MYC, PT-α, IL-R, PKC-α, GSTA1, GATA-2, and PLGF and the mRNA is for a protein selected from said group.

44. A method of claim 1 wherein the protein is selected from the group consisting of a RAB protein, PKC, and TfR.

45. A method of claim 34 wherein the upregulated protein is selected from the group consisting of a RAB protein, PKC, and TfR and the mRNA is for a protein selected from said group.

46. A method of claim 1 wherein the protein is selected from the group consisting of Jak 3, EGR-1, TNK1, and CAMK IV.

47. A method of claim 34 wherein the upregulated protein is selected from the group consisting of Jak 3, EGR-1, TNK1, and CAMK IV and the mRNA is for a protein selected from said group.

48. A method of claim 1 wherein the protein is selected from the group consisting of HSP40, HSP70, HSP60, HSO27, fMLP-related receptor, HSP27, glutaredoxin, CREB, gadd 153, XPG, XPD, ubiquitin, conjugating enzyme, RAD 23, and ataxia telengiectasia.

49. A method of claim 34 wherein the upregulated protein is selected from the group consisting of HSP40, HSP70, HSP60, HSO27, fMLP-related receptor, HSP27, glutaredoxin, CREB, gadd 153, XPG, XPD, ubiquitin, conjugating enzyme, RAD 23, and ataxia telengiectasia and the mRNA is for a protein selected from said group.

50. A method of decreasing the levels of a protein in a Peyer's patch cell, said method comprising delivering to said cell a DNA molecule coding for an anti-sense nucleic acid molecule, a ribozyme nucleic acid molecule, an RNA interference nucleic acid molecule (RNAi), said anti-sense molecule, ribozyme or RNAi nucleic acid being complementary to a sequence of at least 10 nucleotides of the mRNA for said protein, wherein absent said anti-sense molecule, ribozyme or RNAi nucleic acid, the levels of said protein or its mRNA is less than in a non-Peyer's patch cell.

51. A method of increasing the extent to which the function of a protein is carried out in a Peyer's patch cell, said method comprising delivering to said cell a nucleic acid coding for said protein, wherein absent said delivery, the level of said protein or its mRNA is greater in said cell than in a non-Peyer's patch cell.

52. A chimeric protein that comprises two or more segments, each of said segments enhancing a different step in the peptide transport process, said steps selected from the group consisting of binding to a cell, transporting the peptide into the cell, transporting the peptide through the cell, and transporting the peptide out of the cell.

53. A chimeric protein of claim 52 wherein one of the segments binds to the cell.

54. A chimeric protein of claim 52 wherein one of the segments is a protein that is more prevalent in a Peyer's patch cell than in a non-Peyer's patch cell.

55. A chimeric protein of claim 52 wherein the cell is a Peyer's patch cell.

56. A chimeric protein of claim 55 wherein the cell is an M cell.

57. A method of targeting a composition or delivery vehicle to a Peyer's patch cell said method comprising utilizing a composition or vehicle that contains a protein ligand that will specifically bind to a protein that is up-regulated in Peyer's patch cells.

58. The method of claim 57 wherein the composition or delivery vehicle comprises a drug or antigen.

59. A method of selecting for a ligand that will selectively bind to a target in a Peyer's patch cell, said method comprising contacting a phage library with a protein that is upregulated in Peyer's patch cells.

60. The method of claim 59 wherein the protein is attached to a solid substrate.

61. A method of claim 1 wherein the protein is selected from the group consisting of HGF activator, ezrin, NCAD, MNDA, and LHX1.

62. A method of claim 34 wherein the upregulated protein is selected from the group consisting of HGF activator, ezrin, NCAD, MNDA, and LHX1, and the mRNA is for a protein selected from said group.

63. A method of claim 1 wherein the protein is selected from the group consisting of cadherin 2, neural cell adhesion molecule, integrin alpha 3, leukocyte adhesion glycoprotein p150, integrin beta 4, TIE, NCAML1, α3β1 integrin, CD11C antigen, CD104 antigen, CD44, NMDA, TKT, ephrin (type A), and Sp1.

64. A method of claim 34 wherein the upregulated protein is selected from the group consisting of cadherin 2, neural cell adhesion molecule, integrin alpha 3, leukocyte adhesion glycoprotein p150, integrin beta 4, TIE, NCAML1, α3β1 integrin, CD11C antigen, CD104 antigen, CD44, NMDA, TKT, ephrin (type A), and Sp1, and the mRNA is for a protein selected from said group.

65. A method of promoting enterocyte-M cell conversion, said method comprising orally administering an antigen, antigenic composition, or antigen-carrying particle to a person and either simultaneously with, or prior to, said administration, also orally administering a bacteria, or pro-biotic yogurts, or bacterial component to said person.

The application's sequence listing, which the Patent Office published only in electronic form, follows.

SEQUENCE LISTING (349 sequences)

SEQ ID NO: 1 - protein, 34 aa, Artificial Sequence
  Listed in Table titled "Peptides that Target to and/or Enhance Up take Across the GIT"
ADDFMGCMLTLPTSLGGEGSPYNYYDTHEANGPH

SEQ ID NO: 2 - protein, 30 aa, Artificial Sequence
  Listed in Table titled "Peptides that Target to and/or Enhance Up take Across the GIT"
TPTTTATVVGTTGPVDLSSLHLLRHPCREF

SEQ ID NO: 3 - protein, 30 aa, Artificial Sequence
  Listed in Table titled "Peptides that Target to and/or Enhance Up take Across the GIT"
MSPDHQYALQSSPVLPCCRPLLVDSDYIHS

SEQ ID NO: 4 - protein, 34 aa, Artificial Sequence
  Listed in Table titled "Peptides that Target to and/or Enhance Up take Across the GIT"
RGYGRLAESCCVNRCIRTVGGCGNSPASDILSAT

SEQ ID NO: 5 - protein, 38 aa, Artificial Sequence
  Listed in Table titled "Peptides that Target to and/or Enhance Up take Across the GIT"
STPGRGSGRDTGANNPADTPYANPSHRDTILSLDPSLL

SEQ ID NO: 6 - protein, 39 aa, Artificial Sequence
  Listed in Table titled "Peptides that Target to and/or Enhance Up take Across the GIT"
RQHLVVRDLHGPRFRDTNTGVAGTFSPPVSVADTHRTPD

SEQ ID NO: 7 - protein, 39 aa, Artificial Sequence
  Listed in Table titled "Peptides that Target to and/or Enhance Up take Across the GIT"
SFSNLTAGDEEDDHFSGGRFNHANLTSRSHNRGQLASSA

SEQ ID NO: 8 - protein, 39 aa, Artificial Sequence
  Listed in Table titled "Peptides that Target to and/or Enhance Up take Across the GIT"
RQSVLDSWGGKTSVTGLSERYYASHSHTSAPTPHYASHS

SEQ ID NO: 9 - protein, 40 aa, Artificial Sequence
  Listed in Table titled "Peptides that Target to and/or Enhance Up take Across the GIT"
RQWVGDRDAGEGNTWVDEKYSRDANVISYRSHNHASQGTL

SEQ ID NO: 10 - protein, 33 aa, Artificial Sequence
  Listed in Table titled "Peptides that Target to and/or Enhance Up take Across the GIT"
RASDCDVECNLRWVEDVGGVWYAKTVSRMLSTT

SEQ ID NO: 11 - protein, 44 aa, Artificial Sequence
  Listed in Table titled "Peptides that Target to and/or Enhance Up take Across the GIT"
RQSAGFLGFAPTNIDDTSFNAGCGDTLAIPCRHRSSLISPARPP

SEQ ID NO: 12 - protein, 44 aa, Artificial Sequence
  Listed in Table titled "Peptides that Target to and/or Enhance Up take Across the GIT"
RSGAYESPDGRGGRSYVGGGGGCGNIGRKHNLWGLRTASPACWD

SEQ ID NO: 13 - protein, 44 aa, Artificial Sequence
  Listed in Table titled "Peptides that Target to and/or Enhance Up take Across the GIT"
SPRSFWPVVSRHESFGISNYLGCGYRTCISGTMTKSSPIYPRHS

SEQ ID NO: 14 - protein, 44 aa, Artificial Sequence
  Listed in Table titled "Peptides that Target to and/or Enhance Up take Across the GIT"
SSSSDWGGVPGKVVRERFKGRGCGISITSVLTGKPNPCPEPKAA

SEQ ID NO: 15 - protein, 44 aa, Artificial Sequence
  Listed in Table titled "Peptides that Target to and/or Enhance Up take Across the GIT"
RVGQCTDSDVRRPWARSCAHQGCGAGTRNSHGCITRPLRQASAH

SEQ ID NO: 16 - protein, 39 aa, Artificial Sequence
  Listed in Table titled "Peptides that Target to and/or Enhance Up take Across the GIT"
SHSGGMNRAYGDVFRELRDRWNATSHHTRPTPQLPRGPN

SEQ ID NO: 17 - protein, 41 aa, Artificial Sequence
  Listed in Table titled "Peptides that Target to and/or Enhance Up take Across the GIT"
SPCGGSWGRFMQGGLFGGRTDGCGAHRNRTSASLEPPSSDY

SEQ ID NO: 18 - protein, 39 aa, Artificial Sequence
  Listed in Table titled "Peptides that Target to and/or Enhance Up take Across the GIT"
RGAADQRRGWSENLGLPRVGWDAIAHNSYTFTSRRPRPP

SEQ ID NO: 19 - protein, 44 aa, Artificial Sequence
  Listed in Table titled "Peptides that Target to and/or Enhance Up take Across the GIT"
SGGEVSSWGRVNDLCARVSWTGCGTARSARTDNKGFLPKHSSLR

SEQ ID NO: 20 - protein, 44 aa, Artificial Sequence
  Listed in Table titled "Peptides that Target to and/or Enhance Up take Across the GIT"
SDSDGDHYGLRGGVRCSLRDRGCGLALSTVHAGPPSFYPKLSSP

SEQ ID NO: 21 - protein, 39 aa, Artificial Sequence
  Listed in Table titled "Peptides that Target to and/or Enhance Up take Across the GIT"
RSLGNYGVTGTVDVTVLPMPGHANHLGVSSASSSDPPRR

SEQ ID NO: 22 - protein, 38 aa, Artificial Sequence
  Listed in Table titled "Peptides that Target to and/or Enhance Up take Across the GIT"
RTTTAKGCLLGSFGVLSGCSFTPTSPPPHLGYPPHSVN

SEQ ID NO: 23 - protein, 39 aa, Artificial Sequence
  Listed in Table titled "Peptides that Target to and/or Enhance Up take Across the GIT"
SPKLSSVGVMTKVTELPTEGPNAISIPISATLGPRNPLR

SEQ ID NO: 24 - protein, 39 aa, Artificial Sequence
  Listed in Table titled "Peptides that Target to and/or Enhance Up take Across the GIT"
RWCGAELCNSVTKKFRPGWRDHANPSTHHRTPPPSQSSP

SEQ ID NO: 25 - protein, 44 aa, Artificial Sequence
  Listed in Table titled "Peptides that Target to and/or Enhance Up take Across the GIT"
RWCGADDPCGASRWRGGNSLFGCGLRCSAAQSTPSGRIHSTSTS

SEQ ID NO: 26 - protein, 39 aa, Artificial Sequence
  Listed in Table titled "Peptides that Target to and/or Enhance Up take Across the GIT"
SKSGEGGDSSRGETGWARVRSHAMTAGRFRWYNQLPSDR

SEQ ID NO: 27 - protein, 38 aa, Artificial Sequence
  Listed in Table titled "Peptides that Target to and/or Enhance Up take Across the GIT"
RSSANNCEWKSDWMRRACIARYANSSGPARAVDTKAAP

SEQ ID NO: 28 - protein, 44 aa, Artificial Sequence
  Listed in Table titled "Peptides that Target to and/or Enhance Up take Across the GIT"
SKWSWSSRWGSPQDKVEKTRAGCGGSPSSTNCHPYTFAPPPQAG

SEQ ID NO: 29 - protein, 44 aa, Artificial Sequence
  Listed in Table titled "Peptides that Target to and/or Enhance Up take Across the GIT"
SGFWEFSRGLWDGENRKSVRSGCGFRGSSAQGPCPVTPATIDKH

SEQ ID NO: 30 - protein, 44 aa, Artificial Sequence
  Listed in Table titled "Peptides that Target to and/or Enhance Up take Across the GIT"
SESGRCRSVSRWMTTWQTQKGGCGSNVSRGSPLDPSHQTGHATT

SEQ ID NO: 31 - protein, 39 aa, Artificial Sequence
  Listed in Table titled "Peptides that Target to and/or Enhance Up take Across the GIT"
REWRFAGPPLDLWAGPSLPSFNASSHPRALRTYWSQRPR

SEQ ID NO: 32 - protein, 44 aa, Artificial Sequence
  Listed in Table titled "Peptides that Target to and/or Enhance Up take Across the GIT"
RMEDIKNSGWRDSCRWGDLRPGCGSRQWYPSNMRSSRDYPAGGH

SEQ ID NO: 33 - protein, 36 aa, Artificial Sequence
  Listed in Table titled "Peptides that Target to and/or Enhance Up take Across the GIT"
SHPWYRHWNHGDFSGSGQSRHTPPESPHPGRPNATI

SEQ ID NO: 34 - protein, 44 aa, Artificial Sequence
  Listed in Table titled "Peptides that Target to and/or Enhance Up take Across the GIT"
RYKHDIGCDAGVDKKSSSVRGGCGAHSSPPRAGRGPRGTMVSRL

SEQ ID NO: 35 - protein, 44 aa, Artificial Sequence
  Listed in Table titled "Peptides that Target to and/or Enhance Up take Across the GIT"
SQGSKQCMQYRTGRLTVGSEYGCGMNPARHATPAYPARLLPRYR

SEQ ID NO: 36 - protein, 44 aa, Artificial Sequence
  Listed in Table titled "Peptides that Target to and/or Enhance Up take Across the GIT"
SGRTTSEISGLWGWGDDRSGYGWGNTLRPNYIPYRQATNRHRYT

SEQ ID NO: 37 - protein, 39 aa, Artificial Sequence
  Listed in Table titled "Peptides that Target to and/or Enhance Up take Across the GIT"
RWNWTVLPATGGHYWTRSTDYHAINNHRPSIPHQHPTPI

SEQ ID NO: 38 - protein, 44 aa, Artificial Sequence
  Listed in Table titled "Peptides that Target to and/or Enhance Up take Across the GIT"
SWSSWNWSSKTTRLGDRATREGCGPSQSDGCPYNGRLTTVKPRT

SEQ ID NO: 39 - protein, 37 aa, Artificial Sequence
  Listed in Table titled "Peptides that Target to and/or Enhance Up take Across the GIT"
SGSLNAWQPRSWVGGAFRSHANNNLNPKPTMVTRHPT

SEQ ID NO: 40 - protein, 44 aa, Artificial Sequence
  Listed in Table titled "Peptides that Target to and/or Enhance Up take Across the GIT"
RYSGLSPRDNGPACSQEATLEGCGAQRLMSTRRKGRNSRPGWTL

SEQ ID NO: 41 - protein, 39 aa, Artificial Sequence
  Listed in Table titled "Peptides that Target to and/or Enhance Up take Across the GIT"
SVGNDKTSRPVSFYGRVSDLWNASLMPKRTPSSKRHDDG

SEQ ID NO: 42 - protein, 15 aa, Artificial Sequence
  Listed in Table titled "Peptides that Target to and/or Enhance Up take Across the GIT"
TNAKHSSHNRRLRTR

SEQ ID NO: 43 - protein, 20 aa, Artificial Sequence
  Listed in Table titled "Peptides that Target to and/or Enhance Up take Across the GIT"
SDNAKEPGDYNCCGNGNSTG

SEQ ID NO: 44 - protein, 15 aa, Artificial Sequence
  Listed in Table titled "Peptides that Target to and/or Enhance Up take Across the GIT"
RTRLRRNHSSHKANT

SEQ ID NO: 45 - protein, 16 aa, Artificial Sequence
  Listed in Table titled "Peptides that Target to and/or Enhance Up take Across the GIT"
GPHRRGRPNSRRSSKT

SEQ ID NO: 46 - protein, 14 aa, Artificial Sequence
  Listed in Table titled "Peptides that Target to and/or Enhance Up take Across the GIT"
GTSNGNGCCNYDGP

SEQ ID NO: 47 - protein, 12 aa, Artificial Sequence
  Listed in Table titled "Peptides that Target to and/or Enhance Up take Across the GIT"
ATPPPWLLRTAP

SEQ ID NO: 48 - protein, 12 aa, Artificial Sequence
  Listed in Table titled "Peptides that Target to and/or Enhance Up take Across the GIT"
DGSIHKRNIMPL

SEQ ID NO: 49 - protein, 12 aa, Artificial Sequence
  Listed in Table titled "Peptides that Target to and/or Enhance Up take Across the GIT"
DYDSLSWRSTLH

SEQ ID NO: 50 - protein, 12 aa, Artificial Sequence
  Listed in Table titled "Peptides that Target to and/or Enhance Up take Across the GIT"
GEPTTDMRWRNP

SEQ ID NO: 51 - protein, 12 aa, Artificial Sequence
  Listed in Table titled "Peptides that Target to and/or Enhance Up take Across the GIT"
GLWPWNPVTVLP

SEQ ID NO: 52 - protein, 12 aa, Artificial Sequence
  Listed in Table titled "Peptides that Target to and/or Enhance Up take Across the GIT"
HMLNDPTPPPYW

SEQ ID NO: 53 - protein, 12 aa, Artificial Sequence
  Listed in Table titled "Peptides that Target to and/or Enhance Up take Across the GIT"
KPAYTHEYRWLA

SEQ ID NO: 54 - protein, 12 aa, Artificial Sequence
  Listed in Table titled "Peptides that Target to and/or Enhance Up take Across the GIT"
LETTCASLCYPS

SEQ ID NO: 55 - protein, 12 aa, Artificial Sequence
  Listed in Table titled "Peptides that Target to and/or Enhance Up take Across the GIT"
LGTDWHSVSYTL

SEQ ID NO: 56 - protein, 12 aa, Artificial Sequence
  Listed in Table titled "Peptides that Target to and/or Enhance Up take Across the GIT"
LGTLNAGVPGFP

SEQ ID NO: 57 - protein, 12 aa, Artificial Sequence
  Listed in Table titled "Peptides that Target to and/or Enhance Up take Across the GIT"
LTHSKNPVFLST

SEQ ID NO: 58 - protein, 12 aa, Artificial Sequence
  Listed in Table titled "Peptides that Target to and/or Enhance Up take Across the GIT"
LVPTTHRHWPVT

SEQ ID NO: 59 - protein, 12 aa, Artificial Sequence
  Listed in Table titled "Peptides that Target to and/or Enhance Up take Across the GIT"
LVSNARGFNNLS

SEQ ID NO: 60 - protein, 12 aa, Artificial Sequence
  Listed in Table titled "Peptides that Target to and/or Enhance Up take Across the GIT"
NTRIPEPIRFYM

SEQ ID NO: 61 - protein, 12 aa, Artificial Sequence
  Listed in Table titled "Peptides that Target to and/or Enhance Up take Across the GIT"
NVYTFHSMSPMP

SEQ ID NO: 62 - protein, 12 aa, Artificial Sequence
  Listed in Table titled "Peptides that Target to and/or Enhance Up take Across the GIT"
QHTTLTSHPRQY

SEQ ID NO: 63 - protein, 12 aa, Artificial Sequence
  Listed in Table titled "Peptides that Target to and/or Enhance Up take Across the GIT"
SDFSDTMPHRPS

SEQ ID NO: 64 - protein, 12 aa, Artificial Sequence
  Listed in Table titled "Peptides that Target to and/or Enhance Up take Across the GIT"
SIDTIQILSLRS

SEQ ID NO: 65 - protein, 12 aa, Artificial Sequence
  Listed in Table titled "Peptides that Target to and/or Enhance Up take Across the GIT"
SISWASQPPYSL

SEQ ID NO: 66 - protein, 12 aa, Artificial Sequence
  Listed in Table titled "Peptides that Target to and/or Enhance Up take Across the GIT"
SMVKFPRPLDSR

SEQ ID NO: 67 - protein, 12 aa, Artificial Sequence
  Listed in Table titled "Peptides that Target to and/or Enhance Up take Across the GIT"
SPTLGASVAQTN

SEQ ID NO: 68 - protein, 12 aa, Artificial Sequence
  Listed in Table titled "Peptides that Target to and/or Enhance Up take Across the GIT"
TMSPNVYYTAFG

SEQ ID NO: 69 - protein, 12 aa, Artificial Sequence
  Listed in Table titled "Peptides that Target to and/or Enhance Up take Across the GIT"
TQIPSRPQTPSQ

SEQ ID NO: 70 - protein, 12 aa, Artificial Sequence
  Listed in Table titled "Peptides that Target to and/or Enhance Up take Across the GIT"
VCSNMYFSCRLS

SEQ ID NO: 71 - protein, 12 aa, Artificial Sequence
  Listed in Table titled "Peptides that Target to and/or Enhance Up take Across the GIT"
VPPHPMTYSCQY

SEQ ID NO: 72 - protein, 12 aa, Artificial Sequence
  Listed in Table titled "Peptides that Target to and/or Enhance Up take Across the GIT"
VPRLEATMVPDI

SEQ ID NO: 73 - protein, 12 aa, Artificial Sequence
  Listed in Table titled "Peptides that Target to and/or Enhance Up take Across the GIT"
VPTKPELPVNFT

SEQ ID NO: 74 - protein, 12 aa, Artificial Sequence
  Listed in Table titled "Peptides that Target to and/or Enhance Up take Across the GIT"
WSSDLPQPASTY

SEQ ID NO: 75 - protein, 12 aa, Artificial Sequence
  Listed in Table titled "Peptides that Target to and/or Enhance Up take Across the GIT"
YITPYAHLRGGN

SEQ ID NO: 76 - protein, 12 aa, Artificial Sequence
  Listed in Table titled "Peptides that Target to and/or Enhance Up take Across the GIT"
NVYTDNTLSPTP

SEQ ID NO: 77 - protein, 12 aa, Artificial Sequence
  Listed in Table titled "Peptides that Target to and/or Enhance Up take Across the GIT"
LETTAASLCYPS

SEQ ID NO: 78 - protein, 12 aa, Artificial Sequence
  Listed in Table titled "Peptides that Target to and/or Enhance Up take Across the GIT"
SPYCLSACTTEL

SEQ ID NO: 79 - protein, 12 aa, Artificial Sequence
  Listed in Table titled "Peptides that Target to and/or Enhance Up take Across the GIT"
LETTCASLCYPS

SEQ ID NO: 80 - protein, 12 aa, Artificial Sequence
  Listed in Table titled "Peptides that Target to and/or Enhance Up take Across the GIT"
VPPHPMTYSCQY

SEQ ID NO: 81 - protein, 12 aa, Artificial Sequence
  Listed in Table titled "Peptides that Target to and/or Enhance Up take Across the GIT"
VPPHPMTYSAQY

SEQ ID NO: 82 - protein, 12 aa, Artificial Sequence
  Listed in Table titled "Peptides that Target to and/or Enhance Up take Across the GIT"
VPPHPMTYSSQY

SEQ ID NO: 83 - protein, 12 aa, Artificial Sequence
  Listed in Table titled "Peptides that Target to and/or Enhance Up take Across the GIT"
YQCSYTMPHPPV

SEQ ID NO: 84 - protein, 12 aa, Artificial Sequence
  Listed in Table titled "Peptides that Target to and/or Enhance Up take Across the GIT"
VCSNMYFSCRLS

SEQ ID NO: 85 - protein, 12 aa, Artificial Sequence
  Listed in Table titled "Peptides that Target to and/or Enhance Up take Across the GIT"
VSSNMYFSSRLS

SEQ ID NO: 86 - protein, 19 aa, Artificial Sequence
  Listed in Table titled "Peptides that Target to and/or Enhance Up take Across the GIT"
DYDSLSWRSTLHGGHESSH

SEQ ID NO: 87 - protein, 9 aa, Artificial Sequence
  Listed in Table titled "Peptides that Target to and/or Enhance Up take Across the GIT"
GNPTSTMRW

SEQ ID NO: 88 - protein, 8 aa, Artificial Sequence
  Listed in Table titled "Peptides that Target to and/or Enhance Up take Across the GIT"
PWNSATVL

SEQ ID NO: 89 - protein, 8 aa, Artificial Sequence
  Listed in Table titled "Peptides that Target to and/or Enhance Up take Across the GIT"
NDPTAPPY

SEQ ID NO: 90 - protein, 21 aa, Artificial Sequence
  Listed in Table titled "Peptides that Target to and/or Enhance Up take Across the GIT"
KKAAAVLLPVLLAAPFITCLC

SEQ ID NO: 91 - protein, 16 aa, Artificial Sequence
  Listed in Table titled "Peptides that Target to and/or Enhance Up take Across the GIT"
KKKAAAVLLPVLLAAP

SEQ ID NO: 92 - protein, 19 aa, Artificial Sequence
  Listed in Table titled "Peptides that Target to and/or Enhance Up take Across the GIT"
KKAAAVLLPVLLAAPREDL

SEQ ID NO: 93 - protein, 16 aa, Artificial Sequence
  Listed in Table titled "Peptides that Target to and/or Enhance Up take Across the GIT"; partially cyclic peptide
KKCAAVLLPVLLAAPC

SEQ ID NO: 94 - protein, 13 aa, Artificial Sequence
  Listed in Table titled "Peptides that Target to and/or Enhance Up take Across the GIT"; cyclic peptide
CAAVLLPVLLAAC

SEQ ID NO: 95 - protein, 14 aa, Artificial Sequence
  Listed in Table titled "Peptides that Target to and/or Enhance Up take Across the GIT"; partially cyclic peptide
KKCAAVLLPVLLAC

SEQ ID NO: 96 - protein, 11 aa, Artificial Sequence
  Listed in Table titled "Peptides that Target to and/or Enhance Up take Across the GIT"
CAAVLLPVLLC

SEQ ID NO: 97 - protein, 10 aa, Artificial Sequence
  Listed in Table titled "Peptides that Target to and/or Enhance Up take Across the GIT"
CAAVLLPVLC

SEQ ID NO: 98 - protein, 13 aa, Artificial Sequence
  Listed in Table titled "Peptides that Target to and/or Enhance Up take Across the GIT"
CAVLLPVLLAAPC

SEQ ID NO: 99 - protein, 12 aa, Artificial Sequence
  Listed in Table titled "Peptides that Target to and/or Enhance Up take Across the GIT"
CVLLPVLLAAPC

SEQ ID NO: 100 - protein, 11 aa, Artificial Sequence
  Listed in Table titled "Peptides that Target to and/or Enhance Up take Across the GIT"
CLLPVLLAAPC

SEQ ID NO: 101 - protein, 10 aa, Artificial Sequence
  Listed in Table titled "Peptides that Target to and/or Enhance Up take Across the GIT"
CLPVLLAAPC

SEQ ID NO: 102 - protein, 12 aa, Artificial Sequence
  Listed in Table titled "Peptides that Target to and/or Enhance Up take Across the GIT"
AAVLLPVLLAAP

SEQ ID NO: 103 - protein, 11 aa, Artificial Sequence
  Listed in Table titled "Peptides that Target to and/or Enhance Up take Across the GIT"
AAVLLPVLLAA

SEQ ID NO: 104 - protein, 12 aa, Artificial Sequence
  Listed in Table titled "Peptides that Target to and/or Enhance Up take Across the GIT"
KKAAVLLPVLLA

SEQ ID NO: 105 - protein, 9 aa, Artificial Sequence
  Listed in Table titled "Peptides that Target to and/or Enhance Up take Across the GIT"
AAVLLPVLL

SEQ ID NO: 106 - protein, 8 aa, Artificial Sequence
  Listed in Table titled "Peptides that Target to and/or Enhance Up take Across the GIT"
AAVLLPVL

SEQ ID NO: 107 - protein, 11 aa, Artificial Sequence
  Listed in Table titled "Peptides that Target to and/or Enhance Up take Across the GIT"
AVLLPVLLAAP

SEQ ID NO: 108 - protein, 10 aa, Artificial Sequence
  Listed in Table titled "Peptides that Target to and/or Enhance Up take Across the GIT"
VLLPVLLAAP

SEQ ID NO: 109 - protein, 9 aa, Artificial Sequence
  Listed in Table titled "Peptides that Target to and/or Enhance Up take Across the GIT"
LLPVLLAAP

SEQ ID NO: 110 - protein, 8 aa, Artificial Sequence
  Listed in Table titled "Peptides that Target to and/or Enhance Up take Across the GIT"
LPVLLAAP

SEQ ID NO: 111 - protein, 17 aa, Artificial Sequence
  Listed in Table titled "Peptides that Target to and/or Enhance Up take Across the GIT"
AAVLLPVLLAAKKKRKA

SEQ ID NO: 112 - protein, 17 aa, Artificial Sequence
  Listed in Table titled "Peptides that Target to and/or Enhance Up take Across the GIT"
KKKRKAAAAVLLPVLLA

SEQ ID NO: 113 - protein, 407 aa, Homo sapiens
MVNEYKKILLLKGFELMDDYHFTSIKSLLAYDLGLTTKMQEEYNRIKITDLMEKKFQGVACLDKLIELAKDMPSLKNLVNNLRKEKSKVAKKIKTQEKAPVKKINQEEVGLAAPAPTARNKLTSEARGRIPVAQKRKTPNKEKTEAKRNKVSQEQSKPPGPSGASTSAAVDHPPLPQTSSSTPSNTSFTPNQETQAQRQVDARRNVPQNDPVTVVVLKATAPFKYESPENGKSTMFHATVASKTQYFHVKVFDINLKEKFVRKKVITISDYSECKGVMEIKEASSVSDFNQNFEVPNRIIEIANKTPKISQLYKQASGTMVYGLFMLQKKSVHKKNTIYEIQDNTGSMDVVGSGKWHNIKCEKGDKLRLFCLQLRTVDRKLKLVCGSHSFIKVIKAKKNKEGPMNVN

SEQ ID NO: 114 - protein, 276 aa, Homo sapiens
MEHQLLCCEVETIRRAYPDANLLNDRVLRAMLKAEETCAPSVSYFKCVQKEVLPSMRKIVATWMLEVCEEQKCEEEVFPLAMNYLDRFLSLEPVKKSRLQLLGATCMFVASKMKETIPLTAEKLCIYTDNSIRPEELLQMELLLVNKLKWNLAAMTPHDFIEHFLSKMPEAEENKQIIRKHAQTFVALCATDVKFISNPPSMVAAGSVVAAVQGLNLRSPNNFLSYYRLTRFLSRVIKCDPDCLRACQEQIEALLESSLRQAQQNMDPKAAEEEEE

SEQ ID NO: 115 - protein, 156 aa, Homo sapiens
MEPAAGSSMEPSADWLATAAARGRVEEVRALLEAGALPNAPNSYGRRPIQVMMMGSARVAELLLLHGAEPNCADPATLTRPVHDAAREGFLDTLVVLHRAGARLDVRDAWGRLPVDLAEELGHRDVARYLRAAAGGTRGSNHARIDAAEGPSDIPD

SEQ ID NO: 116 - protein, 316 aa, Homo sapiens
MSDASLRSTSTMERLVARGTFPVLVRTSACRSLFGPVDHEELSRELQARLAELNAEDQNRWDYDFQQDMPLRGPGRLQWTEVDSDSVPAFYRETVQVGRCRLLLAPRPVAVAVAVSPPLEPAAESLDGLEEAPEQLPSVPVPAPASTPPPVPVLAPAPAPAPAPVAAPVAAPVAVAVLAPAPAPAPAPAPAPAPVAAPAPAPAPAPAPAPAPAPAPDAAPQESAEQGANQGQRGQEPLADQLHSGISGRPAAGTAAASANGAAIKKLSGPLISDFFAKRKRSAPEKSSGDVPAPCPSPSAAPGVGSVEQTPRKRLR

SEQ ID NO: 117 - protein, 586 aa, Homo sapiens
MPKPINVRVTTMDAELEFAIQPNTTGKQLFDQVVKTIGLREVWYFGLHYVDNKGFPTWLKLDKKVSAQEVRKENPLQFKFRAKFYPEDVAEELIQDITQKLFFLQVKEGILSDEIYCPPETAVLLGSYAVQAKFGDYNKEVHKSGYLSSERLIPQRVMDQHKLTRDQWEDRIQVWHAEHRGMLKDNAMLEYLKIAQDLEMYGINYFEIKNKKGTDLWLGVDALGLNIYEKDDKLTPKIGFPWSEIRNISFNDKKFVIKPIDKKAPDFVFYAPRLRINKRILQLCMGNHELYMRRRKPDTIEVQQMKAQAREEKHQKQLERQQLETEKKRRETVEREKEQMMREKEELMLRLQDYEEKTKKAERELSEQIQRALQLEEERKRAQEEAERLEADRMAALRAKEELERQAVDQIKSQEQLAAELAEYTAKIALLEEARRRKEDEVEEWQHRAKEAQDDLVKTKEELHLVMTAPPPPPPPVYEPVSYHVQESLQDEGAEPTGYSAELSSEGIRDDRNEEKRITEAEKNERVQRQLVTLSSELSQARDENKRTHNDIIHNENMRQGRDKYKTLRQIRQGNTKQRIDEFEAL

SEQ ID NO: 118 - DNA, 10976 bp, Homo sapiens
gagctcggatcccatcgcagctaccgcgatgagaggcgctcgcggcgcctgggattttctctgcgttctgctcctactgcttcgcgtccagacaggtgggacaccgcggctggctccccgaccgtgcgactactcgcgaagcctgtgccctgggagggtggtaccgccatggcatccggagagaggactgcgggccctcagtgggcctgcgttccagcctccggggagactccaggtggccctcggactctccggcgccctgcctcgctcacctgcgcgaggagaccccagctgctggtggtgggggacgcgaatccggggttcttcgggaatggggacagcaagagggggttaggcgtgagcgaggctgcaggctccgtgcgagtttggggtggcttttgtgccgacgttgcgcgggggcggaggcgggggctcagggtttgcaccgagcgccttctctctcggtgcgaggccggccgcagcttccttttgttaaaagttgcgtgtgtgtgacggcgcccgggctgcagcctcaacctcctgggcttaagtgatctcccacctcagcctcccgcctcagcctcccatgtagctgggaaaacaggttcccactaccatgcccagctaatgttttttctagtttttgtagatgtgttgggcggtgggggcgtctcactgcgttgcccaggctggtctcgaactcctaggctcaagcaatcttcccacctcagcctcccagagtgctgggattacaggcgtgacgacggcacctggccagcagtttgttctttaaaccctgaaatgtatgtgaggaccatgtgtcacactagcatggacgttttcccagcatctagcatggtgctttgtagatgataattaatgaataggtatttgaatacatggaggcatgcatggctgaatgaagtggctgttgtaaaatttctagggttcaggtttcatattcagagcctaaagtttgcatcttataaactaaatagtttcctatctaggaaacctatttaggcattagggtgttaaaacaggtgtatcattttctgccttagtgtttagagatttgtgaatagttctccttttgatgaacattgccatgtaaagagagttatacagaaataactgaattcacacagttttaaggaaaagctattctatgtcatggtcatgtatattctgccaaagagagtgacaggccagtagtttcttttttctttttccccatagtgtgagattttgtttctgttgtttctaagctgggtgtctgcatgtccacactgcgaagatggcccatatcagaatgaaaacttgacccaattgtatgtttagcccagagaaggctggggcattcagcacatcctggcttggggaccaaatgtgaccctcaggattaattgagggttggagaaaataattttatagatgaacttaagacattttagacagaactctcttttcagccataaatagcagggcagctttgtcctatttttattgtagagtacacagaagatggaactcagtattggaagaagtgctttatttcgccaaggaagaagatcatactcaacacgattctgtttttcttggcaggctcttctcaaccatctgtgagtccaggggaaccgtctccaccatccatccatccaggaaaatcagacttaatagtccgcgtgggcgacgagattaggctgttatgcactgatccgggctttgtcaaatggacttttgagatcctggatgaaacgaatgagaataagcagaatgaatggatcacggaaaaggcagaagccaccaacaccggcaaatacacgtgcaccaacaaacacggcttaagcaattccatttatgtgtttgttagaggtaaatgcttggctttctgcagcaggtcatgtcactttaggagggttgcttttatgacaccgcagtttcatctatgaaatggcaataatgatagtactgatcatgggaggggcaatttgaagattaaatgagattaagtgtaatggtccaagcttagtgcgtgatacatggaaagcgtttaataaatgttaattctcaatagtactagatggataaattttgcttttgtttacacagaaaaaagcagccatttgggccactagtcatgaaaggcaacatattagatctttaaaagtgtttcagtgtctgtgaccagccattccaactactgatttggatatgcttcttatagatcctgccaagcttttccttgttgaccgctccttgtatgggaaagaagacaacgacacgctggtccgctgtcctctcacagacccagaagtgaccaattattccctcaaggggtgccaggggaagcctcttcccaaggacttgaggtttattcctgaccccaaggcgggcatcatgatcaaaagtgtgaaacgcgcctaccatcggctctgtctgcattgttctgtggaccaggagggcaagtcagtgctgtcggaaaaattcatcctgaaagtgaggccaggtaccttgctttcttatctgcctctggagttgagaactcacttatctaaagagacttctcttctcgttgatcgtaagctgtacacatttgaggagaaatggtaaatcaaaatttcatgctataatacaaattatttgaggggccacatttcttttcattctagccttcaaagctgtgcctgttgtgtctgtgtccaaagcaagctatcttcttagggaaggggaagaattcacagtgacgtgcacaataaaagatgtgtctagttctgtgtactcaacgtggaaaagagaaaacagtcaggtgagtgaatcgcttcattcttctcatgttctgtctctgtgggagatgataagttttctctttcagaagagtctgtcctgaaactgcctcgactagtgcgtctgtcagaggagaagttaattgctgctatttttaatttatctaggaaagattctgaatataaattatatggtaatcttcatttttttttctccttttctgaaaccagcagactaaactacaggagaaatataatagctggcatcacggtgacttcaattatgaacgtcaggcaacgttgactatcagttcagcgagagttaatgattctggagtgttcatgtgttatgccaataatacttttggatcagcaaatgtcacaacaaccttggaagtagtaggtaaatacctctatgggaatgtttaaattactggcagtagtgaaagaagaaattattagacagtttcttttttatgtaaatggaatgttgaacagattcttagaattttgttatcactgaatgaatgaaaattatccttgtagcctcttgcaatgaaagcacaattctgttttttttgtccagtagttgtagataatgtttctttctgtcttatttcattctaattagataaaggattcattaatatcttccccatgataaacactacagtatttgtaaacgatggagaaaatgtagatttgattgttgaatatgaagcattccccaaacctgaacaccagcagtggatctctctgaacagaaccttcactgataaatgggaagattatcccaagtctgagaatgaaagtaatatcaggtaagaaatggaccttgccctggggattacacattacccccttttccagtgggcttatcagatcttatttctgtaacccgtaaatccacgagaagatacctggtaaagaagaaagtctattttgctaatactttactgaattaaatgagttatatttttcctcaaacaggcatagatttccaggtagaaactgaaaaagacatgccttccaaggcatgctatccacaggtgattgactagttgtcttttctttgtagatacgtaagtgaacttcatctaacgagattaaaaggcaccgaaggaggcacttacacattcctagtgtccaattctgacgtcaatgctgccatagcatttaatgtttatgtgaatagtaagtaacatgaagggctcttttaattttttattcttttaagttgtggctcgtgtttgtaacagctgcaaggactcaacttgctgtactaaaggttgtagggatttagagagggagtgaagtgaatgttgctgaggttttccagcactctgacatatggccatttctgttttcctgtagcaaaaccagaaatcctgacttacgacaggctcgtgaatggcatgctccaatgtgtggcaccaggattcccagagcccacaatagattggtatttttgtccaggaactgagcagaggtgagatgattatttttggcactgcttataatgcagaggggaaggactgcaattcacttgaatttcaaatatgttttctgattttttttaaaaaagctttaactttgttttaaaagtatgccacatcccaagtgttttatgtatttatttattttcctagagtaagccagggcttttgttttcttccctttagatgctctgcttctgtactgccagtggatgtgcagacactaaactcatctgggccaccgtttggaaagctagtggttcagagttctatagattctagtgcattcaagcacaatggcacggttgaatgtaaggcttacaacgatgtgggcaagacttctgcctattttaactttgcatttaaaggtaacaacaaaggtatatttctttttaatccaatttaaggggatgtttaggctctgtctaccatatcagtcatgattttgagctcaattaaccctcactaaagggagtcgactcgatcccatcctgccaaagtttgtgattccacatttctcttccattgtagagcaaatccatccccacaccctgttcactcctttgctgattggtttcgtaatcgtagctggcatgatgtgcattattgtgatgattctgacctacaaatatttacaggtaaccatttatttgttctctctccagagtgctctaatgactgagacaataattattaaaaggtgatctatttttccctttctccccacagaaacccatgatgaagtacagtggaaggttgttgaggagataaatggaaacaattatgtttacatagacccaacacaacttccttatgatcacaaatgggagtttcccagaaacaggctgagttttggtcagtatgaaacaggggctttccatgtcacctttttgggtacacataacagtgactttaaggaactccagtggcttcctttgttttgttccacctgaaacaatgagttttctgtgaaattgcgccccttttgataggtttgccatagagaacatcgtaggaaaatgtctctggacaacattgtttttaattcctttattgattttgaaactgcacaaatggtccttcaattccaccaccagcaccatcaccacttaccttgttgtcttccttcctacagggaaaaccctgggtgctggagctttcgggaaggttgttgaggcaactgcttatggcttaattaagtcagatgcggccatgactgtcgctgtaaagatgctcaagcgtaagttcctgtatggtactgcatgcgcttgacatcagtttgccagttgtgctttttgctaaaatgcatgtttccaattttagcgagtgcccatttgacagaacgggaagccctcatgtctgaactcaaagtcctgagttaccttggtaatcacatgaatattgtgaatctacttggagcctgcaccattggaggtaaagccgtgtccaagctgccttttattgtctgtcaggttatcaaaacatgacattttaatatgattttggcaatgctagattataaactgcttggaagatttttttacccagactgttgttctctcttgctagattttgttttcctcattgttcttaagaatatatgggattgtattgggactaagtagtctgatccactgaagctgaatattaatggccatgaccacccttgggtatttttatgggaggcagaattaatctatatatctcaccttctttctaaccttttcttatgtgcttttagggcccaccctggtcattacagaatattgttgctatggtgatcttttgaattttttgagaagaaaacgtgattcatttatttgttcaaagcaggaagatcatgcagaagctgcactttataagaatcttctgcattcaaaggagtcttcctggtaagactgatttacataaatagttagctgttgacaggcagttcatggggaactctttattcaaactttacatgactttcctcaaattggtccagtctattatgtagcaaaggggatgaggaggtagagcatgacccatgagtgcccttctacatgtcccacttgattcagtcatgacttgtttcatctctcccagcagcgatagtactaatgagtacatggacatgaaacctggagtttcttatgttgtcccaaccaaggccgacaaaaggagatctgtgagaataggtgagtacctacctatcaagcaaccaagagtaactttacagagagtatgtatatcatgctaatgtggaatataacatcattccagtagcaatgatgcagaccagttctgctttatggtagcagtgccaatggtcaatggcagttaggggcaagttcacattagttcattcattaccagcctttggtatgtcattgccactgtcttttcctttcctgacctttatggttgtaattgctaagaaaaatcctctcttcctcacaggctcatacatagaaagagatgtgactcccgccatcatggaggatgacgagttggccctagacttagaagacttgctgagcttttcttaccaggtggcaaagggcatggctttcctcgcctccaagaatgtaagtgggagtgattctctaaagagttttgtgttttgtttttttgatttttttttttttttttttttttttgagaacagagcattttagagccatagttaaaagcagaatgtcatttaaaacaaaagtattggattttttataatataagcaacactatagtattaaaaagttagttttcactctttacaagttaaaatgaatttaaatggttttcttttctcctccaacctaatagtgtattcacagagacttggcagccagaaatatcctccttactcatggtcggatcacaaagatttgtgattttggtctagccagagacatcaagaatgattctaattatgtggttaaaggaaacgtgagtacccattctctgcttgacagtcctgcaaaggatttttagtttcaactttcgataaaaattgtttccgtgactttcataatgtaaatcctgtctagggatatcacacattttagcagtcaaatgtatttcagaggtgattgggatcatctgagttcatataggtaaaaggtttttgtgagatggtactcaagttatcactccacatttcagcaacagcagcatctataagaatatcttctgttcaattttgttgagcttctgaattaacattattgactctgttgtgcttctattacaggctcgactacctgtgaagtggatggcacctgaaagcattttcaacgtgtatacacgtttgaaagtgacgtctggtcctatcggatttttctttgggagctgttctctttaggtaaaatgatccttgccaaaagacaacttcattagactcagagcatcttgaagtttcattggtgtcctgcttccttgtgattaacactgctttgcaaactgtgtctcaggaagcagcccctatcctggaatgccggtcgattctaagttctacaagatgatcaaggaaggcttccggatgctcagcctgaacacgcacctgctgaaatgtaagagccaaaaaatttttcctttaggtcacgttttcccttttatttttctttttagagacagaaacccagatgttgagggttttcataacacagtttgaaatgtcacttggattctttatgacacactggtcaaatgtcatttctgtagtttattttcataatctcttgtcaccaaaaatacagaaagtttcagtaatatttcatacatgcagtgttttatgttatctatatgtcagtccatatgtccagttgcatagccctggaattattactgaagttgctggatgcccatacatttgaaaacaagctgagggcattgaggagggatagtaaatggcccttgtcttgcaggtatgacataatgaagacttgctgggatgcagatcccctaaaaagaccaacattcaagcaaattgttcagctaattgagaagcagatttcagagagcaccaatcatgtgagtataccctggccaggcatagaatcccccttctcccagttccaggtgtgtcctcctcctcaggctttcagggtgaggactaacctcccaaccccttctctcctaatcttaggttgcaaattgggcttcaggtaggggaagtaaagcaatggaaactagttcttttaagagttccatcagttagttgtgatcttgacactgtaagtatgccttttgttgctatgttcgttgtagggactgctgtattgactatgggcttgttttctccagatttactccaacttagcaaactgcagccccaaccgacagaagcccgtggtagaccattctgtgcggatcaattctgtcggcagcaccgcttcctcctcccagcctctgcttgtgcacgacgatgtctgagcagaatcagtgtttgggtcacccctccaggaatgatctcttcttttggcttccatgatggttattttcttttctttcaacttgcatccaactccaggatagtgggcaccccactgcaatcctgtctttctgagcacactttagtggccgatgatttttgtcatcagccaccatcctattgcaaaggttccaactgtatatattcccaatagcaacgtagcttctaccatgaacagaaaacattctgatttggaaaaagagagggaggtatggactgggggccagagtcctttccaaggcttctccaattctgcccaaaaatatggttgatagtttacctgaataaatggtagtaatcacagttggccttcagaaccatccatagtagtatgatgatacaagattagaagctgaaaacctaagtcctttatgtggaaaacagaacatcattagaacaaaggacagagtatgaacacctgggcttaagaaatctagtatttcatgctgggaatgagacataggccatgaaaaaaatgatccccaagtgtgaacaaaagatgctcttctgtggaccactgcatgagcttttatactaccgacctggtttttaaatagagtttgctattagagcattgaattggagagaaggcctccctagccagcacttgtatatacgcatctataaattgtccgtgttcatacatttgaggggaaaacaccataaggtttcgtttctgtatacaaccctggcattatgtccactgtgtatagaagtagattaagagccatataagtttgaaggaaacagttaataccattttttaaggaaacaatataaccacaaagcacagtttgaacaaaatctcctcttttagctgatgaacttattctgtagattctgtggaacaagcctatcagcttcagaatggcattgtactcaatggatttgatgctgtttgacaaagttactgattcactgcatggctcccacaggagtgggaaaacactgccatcttagtttggattcttatgtagcaggaaataaagtataggtttagcctccttcgcaggcatgtcctggacaccgggccagtatctatatatgtgtatgtacgtttgtatgtgtgtagacaaatatttggaggggtatttttgccctgagtccaagagggtcctttagtacctgaaaagtaacttggctttcattattagtactgctcttgtttcttttcacatagctgtctagagtagcttaccagaagcttccatagtggtgcagaggaagtggaaggcatcagtccctatgtatttgcagttcacctgcacttaaggcactctgttatttagactcatcttactgtacctgttccttagaccttccataatgctactgtctcactgaaacatttaaattttaccctttagactgtagcctggatattattcttgtagtttacctctttaaaaacaaaacaaaacaaaacaaaaaactccccttcctcactgcccaatataaaaggcaaatgtgtacatggcagagtttgtgtgttgtcttgaaagattcaggtatgttgcctttatggtttcccccttctacatttcttagactacatttagagaactgtggccgttatctggaagtaaccatttgcactggagttctatgctctcgcacctttccaaagttaacagattttggggttgtgttgtcacccaagagattgttgtttgccatactttgtctgaaaaattcctttgtgtttctattgacttcaatgatagtaagaaaagtggttgttagttatagatgtctaggtacttcaggggcacttcattgagagttttgtcttgccatactttgtctgaaaaattcctttgtgtttctattgacttcaatgatagtaagaaaagtggttgttagttatagatgtctaggtacttcaggggcacttcattgagagttttgtcttggatattcttgaaagtttatatttttataattttttcttacatcagatgtttctttgcagtggcttaatgtttgaaattattttgtggctttttttgtaaatattgaaatgtagcaataatgtcttttgaatattcccaagcccatgagtccttgaaaatattttttatatatacagtaactttatgtgtaaatacataagcggcgtaagtttaaaggatgttggtgttccacgtgttttattcctgtatgttgtccaattgttgacagttctgaagaattctaataaaatgtacatatataaatcaa

SEQ ID NO: 119 - protein, 869 aa, Homo sapiens
RATPPSPISACHSTMGRKLDPTKEKRGPGRKARKQKGAETELVRFLPAVSDENSKRLSSRARKRAAKRRLGSVEAPKTNKSPEAKPSPGKLPKGISAGAVQTAGKKGPQSLFNAPRGKKRPAPGSDEEEEEEDSEEDGMVNHGDLWGSEDDADTVDDYGADSNSEDEEEGEALLPIERAARKQKAREAAAGIQWSEEETEDEEEEKEVTPESGPPKVEEADGGLQINVDEEPFVLPPAGEMEQDAQAPDLQRVHKRIQDIVGILRDFGAQREEGRSRSEYLNRLKKDLAIYYSYGDFLLGKLMDLFPLSELVEFLEANEVPRPVTLRTNTLKTRRRDLAQALINRGVNLDPLGKWSKTGLVVYDSSVPIGATPEYLAGHYMLQGASSMLPVMALAPQEHERILDMCCAPGGKTSYMAQLMKNTGVILANDANAERLKSVVGNLHRLGVTNTIISHYDGRQFPKVVGGFDRVLLDAPCSGTGVISKDPAVKTNKDEKDILRCAHLQKELLLSAIDSVNATSKTGGYLVYCTCSITVEENEWVVDYALKKRNVRLVPTGLDFGQEGFTRFRERRFHPSLRSTRRFYPHTHNMDGFFIAKFKKFSNSIPQSQTGNSETATPTNVDLPQVIPKSENSSQPAKKAKGAGKTKQQLQKQQHPKKASFQKLNGISKGADSELSTVPSVTKTQASSSFQDSSQPAGKAEGIREPKVTGKLKQRSPKLQSSKKVAFLRQNAPPKGTDTQTPAVLSPSKTQATLKPKDHHQPLGRAKGVEKQQFAEQPFEKAAFQKQNDTPKGLSLPLCLPSVPAAPHQQRGRNLSPGATASCCYLRWLKTRRVAHCHCHQVGTLASVRMPSLLCIPMKFNTHFKTSGH

SEQ ID NO: 120 - protein, 331 aa, Homo sapiens
MTAKMETTFYDDALNASFLPSESGPYGYSNPKILKQSMTLNLADPVGSLKPHLRAKNSDLLTSPDVGLLKLASPELERLIIQSSNGHITTTPTPTQFLCPKNVTDEQEGFAEGFVRALAELHSQNTLPSVTSAAQPVNGAGMVAPAVASVAGGSGSGGFSASLHSEPPVYANLSNFNPGALSSGGGAPSYGAAGLAFPAQPQQQQQPPHHLPQQMPVQHPRLQALKEEPQTVPEMPGETPPLSPIDMESQERIKAERKRMRNRIAASKCRKRKLERIARLEEKVKTLKAQNSELASTANMLREQVAQLKQKVMNHVNSGCQLMLTQQLQTF

SEQ ID NO: 121 - protein, 450 aa, Homo sapiens
MSAIQAAWPSGTECIAKYNFHGTAEQDLPFCKGDVLTIVAVTKDPNWYKAKNKVGREGIIPANYVQKREGVKAGTKLSLMPWFHGKITREQAERLLYPPETGLFLVRESTNYPGDYTLCVSCDGKVEHYRIMYHASKLSIDEEVYFENLMQLVEHYTSDADGLCTRLIKPKVMEGTVAAQDEFYRSGWALNMKELKLLQTIGKGEFGDVMLGDYRGNKVAVKCIKNDATAQAFLAEASVMTQLRHSNLVQLLGVIVEEKGGLYIVTEYMAKGSLVDYLRSRGRSVLGGDCLLKFSLDVCEAMEYLEGNNFVHRDLAARNVLVSEDNVAKVSDFGLTKEASSTQDTGKLPVKWTAPEALREKKFSTKSDVWSFGILLWEIYSFGRVPYPRIPLKDVVPRVEKGYKMDAPDGCPPAVYEVMKNCWHLDAAMRPSFLQLREQLEHIKTHELHL

SEQ ID NO: 122 - protein, 152 aa, Homo sapiens
MHHCKRYRSPEPDPYLSYRWKRRRSYSREHEGRLRYPSRREPPPRRSRSRSHDRLPYQRRYRERRDSDTYRCEERSPSFGEDYYGPSRSRHRRRSRERGPYRTRKHAHHCHKRRTRSCSSASSMRLWGTWVKAPLARWWSAWTMPEGSLRLP

SEQ ID NO: 123 - DNA, 834 bp, Homo sapiens
cagctgaccctgctggatcacctcgccttcaagaagattccttatgaggagttcttcggacaaggatggatgaaactggaaaagaatgaaaggaccccttatatcatgaaaaccactaagcacttcaatgacatcagtaacttgattgcttcagaaatcatccgcaatgaggacatcaacgccagggtgagcgccatcgggaagtgggtggccgtagctgacatatgccgctgcctccacaactacaatgccgtactggagatcacctgctccatgaaccgcagtgcaatcttccggctcaaaaagacgtggctcaaagtctctaagcagactaaagctttgattgataagctccaaaagcttgtgtcatcagagggcagatttaagaatctcagagaagctctgaaaaattgtgacccaccctgtgtcccttacctggggatgtacctcaccgacctggccttcatcgaggaggggacgcccaattacacggaagacggcctggtcaacttctccaagatgaggatgatatcccatattatccgagagattcgccagtttcaacaaactgcctacaaaatagagcaccaagcaaaggtaacgcaatatttactggaccaatcttttgtaatggatgaagaaagcctctacgagtcttctctccgaatagaaccaaaactccccacctgaagctgtgcccagacccagaccagctgctcccggggacatgtgctagatgatactgtacatattcgtttggtttcactggattttcttcttcagtatgtgcttctccaagaaatacaaatcgtccttgttcttagattcctgtag

SEQ ID NO: 124 - protein, 110 aa, Homo sapiens
MSDAAVDTSSEITTKDLKEKKEVVEEAENGRDAPANGNANEENGEQEADNEVDEEEEEGGEEEEEEEEGDGEEEDGDEDEEAESATGKRAAEDDEDDDVDTKKQKTDEDD

SEQ ID NO: 125 - protein, 145 aa, Homo sapiens [sequence omitted]

SEQ ID NO: 126 - protein, 439 aa, Homo sapiens
MPLNVSFTNRNYDLDYDSVQPYFYCDEEENFYQQQQQSELQPPAPSEDIWKKFELLPTPPLSPSRRSGLCSPSYVAVTPFSLRGDNDGGGGSFSTADQLEMVTELLGGDMVNQSFICDPDDETFIKNIIIQDCMWSGFSAAAKLVSEKLASYQAARKDSGSPNPARGHSVCSTSSLYLQDLSAAASECIDPSVVFPYPLNDSSSPKSCASQDSSAFSPSSDSLLSSTESSPQGSPEPLVLHEETPPTTSSDSEEEQEDEEEIDVVSVEKRQAPGKRSESGSPSAGGHSKPPHSPLVLKRCHVSTHQHNYAAPPSTRKDYPAAKRVKLDSVRVLRQISNNRKCTSPRSSDTEENVKRRTHNVLERQRRNELKRSFFALRDQIPELENNEKAPKVVILKKATAYILSVQAEEQKLISEEDLLRKRREQLKHKLEQLRNSCA

SEQ ID NO: 127 - protein, 484 aa, Homo sapiens
MRHSKRTYCPDWDDKDWDYGKWRSSSSHKRRKRSHSSAQENKRCKYNHSKMCDSHYLESRSINEKDYHSRRYIDEYRNDYTQGCEPGHRQRDHESRYQNHSSKSSGRSGRSSYKSKHRIHHSTSHRRSHGKSHRRKRTRSVEDDEEGHLICQSGDVLSARYEIVDTLGEGAFGKVVECIDHKAGGRHVAVKIVKNVDRYCEAARSEIQVLEHLNTTDPNSTFRCVQMLEWFEHHGHICIVFELLGLSTYDFIKENGFLPFRLDHIRKMAYQICKSVNFLHSNKLTHTDLKPENILFVQSDYTEAYNPKIKRDERTLINPDIKVVDFGSATYDDEHHSTLVSTRHYRAPEVILALGWSQPCDVWSIGCILIEYYLGFTVFPTHDSKEHLAMMERILGPLPKHMIQKTRKRKYFHHDRLDWDEHSSAGRYVSRACKPLKEFMLSQDVEHERLFDLIQKMLEYDPAKRITLREALKHPFFDLLKKSI

SEQ ID NO: 128 - protein, 166 aa, Homo sapiens
MLLEEVRAGDRLSGAAARGDVQEVRRLLHRELVHPDALNRFGKTALQVMMFGSTAIALELLKQGASPNVQDTSGTSPVHDAARTGFLDTLKVLVEHGADVNVPDGTGALPIHLAVQEGHTAVVSFLAAESDLHRRDARGLTPLELALQRGAQDLVDILQGHMVAPL

SEQ ID NO: 129 - protein, 1338 aa, Homo sapiens
MVSYWDTGVLLCALLSCLLLTGSSSGSKLKDPELSLKGTQHIMQAGQTLHLQCRGEAAHKWSLPEMVSKESERLSITKSACGRNGKQFCSTLTLNTAQANHTGFYSCKYLAVPTSKKKETESAIYIFISDTGRPFVEMYSEIPEIIHMTEGRELVIPCRVTSPNITVTLKKFPLDTLIPDGKRIIWDSRKGFIISNATYKEIGLLTCEATVNGHLYKTNYLTHRQTNTIIDVQISTPRPVKLLRGHTLVLNCTATTPLNTRVQMTWSYPDEKNKRASVRRRIDQSNSHANIFYSVLTIDKMQNKDKGLYTCRVRSGPSFKSVNTSVHIYDKAFITVKHRKQQVLETVAGKRSYRLSMKVKAFPSPEVVWLKDGLPATEKSARYLTRGYSLIIKDVTEEDAGNYTILLSIKQSNVFKNLTATLIVNVKPQIYEKAVSSFPDPALYPLGSRQILTCTAYGIPQPTIKWFWHPCNHNHSEARCDFCSNNEESFILDADSNMGNRIESITQRMAIIEGKNKMASTLVVADSRISGIYICIASNKVGTVGRNISFYITDVPNGFHVNLEKMPTEGEDLKLSCTVNKFLYRDVTWILLRTVNNRTMHYSISKQKMAITKEHSITLNLTIMNVSLQDSGTYACRARNVYTGEEILQKKEITIRDQEAPYLLRNLSDHTVAISSSTTLDCHANGVPEPQITWFKNNHKIQQEPGIILGPGSSTLFIERVTEEDEGVYHCKATNQKGSVESSAYLTVQGTSDKSNLELITLTCTCVAATLFWLLLTLFIRKMKRSSSEIKTDYLSIIMDPDEVPLDEQCERLPYDASKWEFARERLKLGKSLGRGAFGKVVQASAFGIKKSPTCRTVAVKMLKEGATASEYKALMTELKILTHIGHHLNVVNLLGACTKQGGPLMVIVEYCKYGNLSNYLKSKRDLFFLNKDAALHMEPKKEKMEPGLEQGKKPRLDSVTSSESFASSGFQEDKSLSDVEEEEDSDGFYKEPITMEDLISYSFQVARGMEFLSSRKCIHRDLAARNILLSENNVVKICDFGLARDIYKNPDYVRKGDTRLPLKWMAPESIFDKIYSTKSDVWSYGVLLWEIFSLGGSPYPGVQMDEDFCSRLREGMRMRAPEYSTPEIYQIMLDCWHRDPKERPRFAELVEKLGDLLQANVQQDGKDYIPINAILTGNSGFTYSTPAFSEDFFKESISAPKFNSGSSDDVRYVNAFKFMSLERIKTFEELLPNATSMFDDYQGDSSTLLASPMLKRFTWTDSKPKASLKIDLRVTSKSKESGLSDVSRPSFCHSSCGHVSEGKRRFTYDHAELERKIACCSPPPDYNSVVLYSTPPI

SEQ ID NO: 130 - DNA, 5297 bp, Homo sapiens
gggccgggccgggctgggctggagcagcggcgcccgggagccgagcttgcagcgagggaccggctgaggcgcgcgggagggaaggaggcaagggctccgcggcgctgtcgcgctgccgctcactctcggggaagagatggcggcggagcggggagcccggcgactcctcagcaccccctccttctggctctactgcctgctgctgctcgggcgccgggcgccgggcgccgcggcggccaggagcggctccgcgccgcagtccccaggagccagcattcgaacgttcactccattttattttctggtggagccggtggatacactctcagttagaggctcttctgttatattaaactgttcagcatattctgagccttctccaaaaattgaatggaaaaaagatggaacttttttaaacttagtatcagatgatcgacgccagcttctcccggatggatctttatttatcagcaatgtggtgcattccaaacacaataaacctgatgaaggttattatcagtgtgtggccactgttgagagtcttggaactattatcagtagaacagcgaagctcatagtagcaggtcttccaagatttaccagccaaccagaaccttcctcagtttatgctgggaacggagcaattctgaattgtgaagttaatgcagatttggtcccatttgtgaggtgggaacagaacagacaaccccttcttctggatgatagagttatcaaacttccaagtggaatgctggttatcagcaatgcaactgaaggagatggcgggctttatcgctgcgtagtggaaagtggtgggccaccaaagtatagtgatgaagttgaattgaaggttcttccagatcctgaggtgatatcagacttggtatttttgaaacagccttctcccttagtcagagtcattggtcaggatgtagtgttgccatgtgttgcttcaggacttcctactccaaccattaaatggatgaaaaatgaggaggcacttgacacagaaagctctgaaagattggtattgctggcaggtggtagcctggagatcagtgatgttactgaggatgatgctgggacttatttttgtatagctgataatggaaatgagacaattgaagctcaagcagagcttacagtgcaagctcaacctgaattcctgaagcagcctactaatatatatgctcacgaatctatggatattgtatttgaatgtgaagtgactggaaaaccaactccaactgtgaagtgggtcaaaaatggggatatggttatcccaagtgattattttaagattgtaaaggaacataatcttcaagttttgggtctggtgaaatcagatgaagggttctatcagtgcattgctgaaaatgatgttggaaatgcacaagctggagcccaactgataatccttgaacatgcaccagccacaacgggaccactgccttcagctcctcgggatgtcgtggcctccctggtctctacccgcttcatcaaattgacgtggcggacacctgcatcagatcctcacggagacaaccttacctactctgtgttctacaccaaggaagggattgctagggaacgtgttgagaataccagtcacccaggagagatgcaagtaaccattcaaaacctaatgccagcgaccgtgtacatctttagagttatggctcaaaataagcatggctcaggagagagttcagctccactgcgagtagaaacacaacctgaggttcagctccctggcccagcacctaaccttcgtgcatatgcagcttcgcctacctccatcactgttacgtgggaaacaccagtgtctggcaatggggaaattcagaattataagttgtactacatggaaaaggggactgataaagaacaggatgttgatgtttcaagtcactcttacaccattaatgggttgaaaaaatatacagagtatagtttccgagtggtggcctacaataaacatggtcctggagtttccacaccagatgttgctgttcgaacattgtcagatgttcccagtgctgctcctcagaatctgtccttggaagtgagaaattcaaagagtattatgattcactggcagccacctgctccagccacacaaaatgggcagattactggctacaagattcgctaccgaaaggcctcccgaaagagtgatgtcactgagaccttggtaagcgggacacagctgtctcagctgattgaaggtcttgatcgggggactgagtataatttccgagtggctgctctaacaatcaatggtacaggcccggcaactgactggctgtctgctgaaacttttgaaagtgacctagatgaaactcgtgttcctgaagtgcctagctctcttcacgtacgcccgctcgttactagcatcgtagtgagctggactcctccagagaatcagaacattgtggtcagaggttacgccattggttatggcattggcagccctcatgcccagaccatcaaagtggactataaacagcgctattacaccattgaaaatctggatcccagctctcactatgtgattaccctgaaagcatttaataacgtgggtgaaggcatccccctgtatgagagtgctgtgaccaggcctcacacagacacttctgaagttgatttatttgttattaatgctccatacactccagtgccagatcccactcccatgatgccaccagtgggagttcaggcttccattctgagtcatgacaccatcaggattacgtgggcagacaactcgctgcccaagcaccagaagattacagactcccgatactacaccgtccgatggaaaaccaacatcccagcaaacaccaagtacaagaatgcaaatgcaaccactttgagttatttggtgactggtttaaagccgaatacactctatgaattctctgtgatggtgaccaaaggtcgaagatcaagtacatggagtatgacagcccatgggaccacctttgaattagttccgacttctccacccaaggatgtgactgttgtgagtaaagaggggaaacctaagaccataattgtgaattggcagcctccctctgaagccaatggcaaaattacaggttacatcatatattacagtacagatgtgaatgcagagatacatgactgggttattgagcctgttgtgggaaacagactgactcaccagatacaagagttaactcttgacacaccatactacttcaaaatccaggcacggaactcaaagggcatgggacccatgtctgaagctgtccaattcagaacacctaaagcggactcctctgataaaatgcctaatgatcaagcctcagggtctggagggaaaggaagccggctgccagacctaggatccgactacaaacctccaatgagcggcagtaacagccctcatgggagccccacctctcctctggacagtaatatgctgctggtcataattgtttctgttggcgtcatcaccatcgtggtggttgtgattatcgctgtcttttgtacccgtcgtaccacctctcaccagaaaaagaaacgagctgcctgcaaatcagtgaatggctctcataagtacaaagggaattccaaagatgtgaaacctccagatctctggatccatcatgagagactggagctgaaacccattgataagtctccagacccaaaccccatcatgactgatactccaattcctcgcaactctcaagatatcacaccagttgacaactccatggacagcaatatccatcaaaggcgaaattcatacagagggcatgagtcagaggacagcatgtctacactggctggaaggcgaggaatgagaccaaaaatgatgatgccctttgactcccagccaccccagcctgtgattagtgcccatcccatccattccctcgataaccctcaccatcatttccactccagcagcctcgcttctccagctcgcagtcatctctaccacccgggcagcccatggcccattggcacatccatgtccctttcagacagggccaattccacagaatccgttcgaaatacccccagcactgacaccatgccagcctcttcgtctcaaacatgctgcactgatcaccaggaccctgaaggtgctaccagctcctcttacttggccagctcccaagaggaagattcaggccagagtcttcccactgcccatgttcgcccttcccacccattgaagagcttcgccgtgccagcaatcccgcctccaggacctcccacctatgatcctgcattgccaagcacaccattactgtcccagcaagctctgaaccatcacattcactcagtgaagacagcctccatcgggactctaggaaggagccggcctcctatgccagtggttgttcccagtgcccctgaagtgcaggagaccacaaggatgttggaagactccgagagtagctatgaaccagatgagctgaccaaagagatggcccacctggaaggactaatgaaggacctaaacgctatcacaacagcatgacgaccttcaccaggacctgacttcaaacctgagtctggaagtcttggaacttaacccttgaaaacaaggaattgtacagagtacgagaggacagcacttgagaacacagaatgagccagcagactggccagcgcctctgtgtagggctggctccaggcatggccacctgccttcccctggtcagcctggaagaagcctgtgtcgaggcagcttccctttgcctgctgatattctgcaggactgggcaccatgggccaaaattttgtgtccagggaagaggcgagaagtgcaacctgcatttcactttgtggtcaggccgtgtctttgtgctgtgactgcatcacctttatggagtgtagacattggcatttatgtacaattttatttgtgtcttattttattttaccttcaaaaacaaaaacgccatccaaaaccaaggaagtccttggtgttctccacaagtggttgacatttgactgcttgttccaattatgtatggaaagtctttgacagtgtgggtcgttcctggggttggcttgttttttggtttcatttttattttttaattctgagtcattgcatcctctaccagctgttaatccatcactctgagggggaggaaatgttgcattgctgtttgtaagctttttttattatttttttattataattattaaaggcctgactctttcctctcatcactgtgagattacagatctatttgaattgaatgaaatgtaacattgaaaaaaaaaaaaaaaaaaaaaaaaaaaaa

SEQ ID NO: 131 - DNA, 4530 bp, Homo sapiens
aattctcgagctcgtcgaccggtcgacgagctcgagggtcgacgagctcgagggcgcgcgcccggcccccacccctcgcagcaccccgcgccccgcgccctcccagccgggtccagccggagccatggggccggagccgcagtgagcaccatggagctggcggccttgtgccgctgggggctcctcctcgccctcttgccccccggagccgcgagcacccaagtgtgcaccggcacagacatgaagctgcggctccctgccagtcccgagacccacctggacatgctccgccacctctaccagggctgccaggtggtgcagggaaacctggaactcacctacctgcccaccaatgccagcctgtccttcctgcaggatatccaggaggtgcagggctacgtgctcatcgctcacaaccaagtgaggcaggtcccactgcagaggctgcggattgtgcgaggcacccagctctttgaggacaactatgccctggccgtgctagacaatggagacccgctgaacaataccacccctgtcacaggggcctccccaggaggcctgcgggagctgcagcttcgaagcctcacagagatcttgaaaggaggggtcttgatccagcggaacccccagctctgctaccaggacacgattttgtggaaggacatcttccacaagaacaaccagctggctctcacactgatagacaccaaccgctctcgggcctgccacccctgttctccgatgtgtaagggctcccgctgctggggagagagttctgaggattgtcagagcctgacgcgcactgtctgtgccggtggctgtgcccgctgcaaggggccactgcccactgactgctgccatgagcagtgtgctgccggctgcacgggccccaagcactctgactgcctggcctgcctccacttcaaccacagtggcatctgtgagctgcactgcccagccctggtcacctacaacacagacacgtttgagtccatgcccaatcccgagggccggtatacattcggcgccagctgtgtgactgcctgtccctacaactacctttctacggacgtgggatcctgcaccctcgtctgccccctgcacaaccaagaggtgacagcagaggatggaacacagcggtgtgagaagtgcagcaagccctgtgcccgagtgtgctatggtctgggcatggagcacttgcgagaggtgagggcagttaccagtgccaatatccaggagtttgctggctgcaagaagatctttgggagcctggcatttctgccggagagctttgatggggacccagcctccaacactgccccgctccagccagagcagctccaagtgtttgagactctggaagagatcacaggttacctatacatctcagcatggccggacagcctgcctgacctcagcgtcttccagaacctgcaagtaatccggggacgaattctgcacaatggcgcctactcgctgaccctgcaagggctgggcatcagctggctggggctgcgctcactgagggaactgggcagtggactggccctcatccaccataacacccacctctgcttcgtgcacacggtgccctgggaccagctctttcggaacccgcaccaagctctgctccacactgccaaccggccagaggacgagtgtgtgggcgagggcctggcctgccaccagctgtgcgcccgagggcactgctggggtccagggcccacccagtgtgtcaactgcagccagttccttcggggccaggagtgcgtggaggaatgccgagtactgcaggggctccccagggagtatgtgaatgccaggcactgtttgccgtgccaccctgagtgtcagccccagaatggctcagtgacctgttttggaccggaggctgaccagtgtgtggcctgtgcccactataaggaccctcccttctgcgtggcccgctgccccagcggtgtgaaacctgacctctcctacatgcccatctggaagtttccagatgaggagggcgcatgccagccttgccccatcaactgcacccactcctgtgtggacctggatgacaagggctgccccgccgagcagagagccagccctctgacgtccatcgtctctgcggtggttggcattctgctggtcgtggtcttgggggtggtctttgggatcctcatcaagcgacggcagcagaagatccggaagtacacgatgcggagactgctgcaggaaacggagctggtggagccgctgacacctagcggagcgatgcccaaccaggcgcagatgcggatcctgaaagagacggagctgaggaaggtgaaggtgcttggatctggcgcttttggcacagtctacaagggcatctggatccctgatggggagaatgtgaaaattccagtggccatcaaagtgttgagggaaaacacatcccccaaagccaacaaagaaatcttagacgaagcatacgtgatggctggtgtgggctccccatatgtctcccgccttctgggcatctgcctgacatccacggtgcagctggtgacacagcttatgccctatggctgcctcttagaccatgtccgggaaaaccgcggacgcctgggctcccaggacctgctgaactggtgtatgcagattgccaaggggatgagctacctggaggatgtgcggctcgtacacagggacttggccgctcggaacgtgctggtcaagagtcccaaccatgtcaaaattacagacttcgggctggctcggctgctggacattgacgagacagagtaccatgcagatgggggcaaggtgcccatcaagtggatggcgctggagtccattctccgccggcggttcacccaccagagtgatgtgtggagttatggtgtgactgtgtgggagctgatgacttttggggccaaaccttacgatgggatcccagcccgggagatccctgacctgctggaaaagggggagcggctgccccagccccccatctgcaccattgatgtctacatgatcatggtcaaatgttggatgattgactctgaatgtcggccaagattccgggagttggtgtctgaattctcccgcatggccagggacccccagcgctttgtggtcatccagaatgaggacttgggcccagccagtcccttggacagcaccttctaccgctcactgctggaggacgatgacatgggggacctggtggatgctgaggagtatctggtaccccagcagggcttcttctgtccagaccctgccccgggcgctgggggcatggtccaccacaggcaccgcagctcatctaccaggagtggcggtggggacctgacactagggctggagccctctgaagaggaggcccccaggtctccactggcaccctccgaaggggctggctccgatgtatttgatggtgacctgggaatgggggcagccaaggggctgcaaagcctccccacacatgaccccagccctctacagcggtacagtgaggaccccacagtacccctgccctctgagactgatggctacgttgcccccctgacctgcagcccccagcctgaatatgtgaaccagccagatgttcggccccagcccccttcgccccgagagggccctctgcctgctgcccgacctgctggtgccactctggaaagggccaagactctctccccagggaagaatggggtcgtcaaagacgtttttgcctttgggggtgccgtggagaaccccgagtacttgacaccccagggaggagctgcccctcagccccaccctcctcctgccttcagcccagccttcgacaacctctattactgggaccaggacccaccagagcggggggctccacccagcaccttcaaagggacacctacggcagagaacccagagtacctgggtctggacgtgccagtgtgaaccagaaggccaagtccgcagaagccctgatgtgtcctcagggagcagggaaggcctgacttctgctggcatcaagaggtgggagggccctccgaccacttccaggggaacctgccatgccaggaacctgtcctaaggaaccttccttcctgcttgagttcccagatggctggaaggggtccagcctcgttggaagaggaacagcactggggagtctttgtggattctgaggccctgcccaatgagactctagggtccagtggatgccacagcccagcttggccctttccttccagatcctgggtactgaaagccttagggaagctggcctgagaggggaagcggccctaagggagtgtctaagaacaaaagcgacccattcagagactgtccctgaaacctagtactgccccccatgaggaaggaacagcaatggtgtcagtatccaggctttgtacagagtgcttttctgtttagtttttactttttttgttttgtttttttaaagacgaaataaagacccaggggagaatgggtgttgtatggggaggcaagtgtggggggtccttctccacacccactttgtccatttgcaaatatattttggaaaac

SEQ ID NO: 132 - protein, 441 aa, Homo sapiens
MKAAVDLKPTLTIIKTEKVDLELFPSPDMECADVPLLTPSSKEMMSQALKATFSGFTKEQQRLGIPKDPRQWTETHVRDWVMWAVNEFSLKGVDFQKFCMNGAALCALGKDCFLELAPDFVGDILWEHLEILQKEDVKPYQVNGVNPAYPESRYTSDYFISYGIEHAQCVPPSEFSEPSFITESYQTLHPISSEELLSLKYENDYPSVILRDPLQTDTLQNDYFAIKQEVVTPDNMCMGRTSRGKLGGQDSFESIESYDSCDRLTQSWSSQSSFNSLQRVPSYDSFDSEDYPAALPNHKPKGTFKDYVRDRADLNKDKPVIPAAALAGYTGSGPIQLWQFLLELLTDKSCQSFISWTGDGWEFKLSDPDEVARRWGKRKNKPKMNYEKLSRGLRYYYDKNIIHKTAGKRYVYRFVCDLQSLLGYTPEELHAMLDVKPDADE

SEQ ID NO: 133 - protein, 354 aa, Homo sapiens
MKAAVDLKPTLTIIKTEKVDLELFPSPDMECADVPLLTPSSKEMMSQALKATFSGFTKEQQRLGIPKDPRQWTETHVRDWVMWAVNEFSLKGVDFQKFCMNGAALCALGKDCFLELAPDFVGDILWEHLEILQKEDVKPYQVNGVNPAYPESRYTSDYFISYGIEHAQCVPPSEFSEPSFITESYQTLHPISSEELLSLKYENDYPSVILRDPLQTDTLQNDYFAIKQEVVTPDNMCMGRTSRGSGPIQLWQFLLELLTDKSCQSFISWTGDGWEFKLSDPDEVARRWGKRKNKPKMNYEKLSRGLRYYYDKNIIHKTAGKRYVYRFVCDLQSLLGYTPEELHAMLDVKPDADE

SEQ ID NO: 134 - protein, 340 aa, Homo sapiens
MGKDYYQTLGLARGASDEEIKRAYRRQALRYHPDKNKEPGAEEKFKEIAEAYDVLSDPRKREIFDRYGEEGLKGSGPSGGSGGGANGTSFSYTFHGDPHAMFAEFFGGRNPFDTFFGQRNGEEGMDIDDPFSGFPMGMGGFTNVNFGRSRSAQEPARKKQDPPVTHDLRVSLEEIYSGCTKKMKISHKRLNPDGKSIRNEDKILTIEVKKGWKEGTKITFPKEGDQTSNNIPADIVFVLKDKPHNIFKRDGSDVIYPARISLREALCGCTVNVPTLDGRTIPVVFKDVIRPGMRRKVPGEGLPLPKTPEKRGDLIIEFEVIFPERIPQTSRTVLEQVLPI

SEQ ID NO: 135 - protein, 340 aa, Homo sapiens; identical to SEQ ID NO: 134

SEQ ID NO: 136 - protein, 106 aa, Homo sapiens
MAQEFVNCKIQPGKVVVFIKPTCPYCRRAQEILSQLPIKQGLLEFVDITATNHTNEIQDYLQQLTGARTVPRVFIGKDCIGGCSDLVSLQQSGELLTRLKQIGALQ

SEQ ID NO: 137 - protein, 1134 aa, Mus musculus
MVWWGSSLLLPTLFLASHVGASVDLTLLANLRITDPQRFFLTCVSGEAGAGRSSDPPLLLEKDDRIVRTFPPGQPLYLARNGSHQVTLRGFSKPSDLVGVFSCVGGAGARRTRVLYVHNSPGAHLFPDKVTHTVNKGDTAVLSAHVHKEKQTDVIWKNNGSYFNTLDWQEADDGRFQLQLQNVQPPSSGIYSATYLEASPLGSAFFRLIVRGCGAGRWGPGCVKDCPGCLHGGVCHDHDGECVCPPGFTGTRCEQACREGRFGQSCQEQCPGTAGCRGLTFCLPDPYGCSCGSGWRGSQCQEACAPDHFGADCRLQCQCQNGGTCDRFSGCVCPSGWHGVHCEKSDRIPQILSMATEVEFNIGTMPRINCAAAGNPFPVRGSMKLRKPDGTMLLSTKVIVEPDRTTAEFEVPSLTLGDSGFWECRVSTSGGQDSRRFKVNVKVPPVPLTAPRLLAKQSRQLVVSPLVSFSGDGPISSVRLHYRPQDSTIAWSAIVVDPSENVTLMNLKPKTGYNVRVQLSRPGEGGEGGWGPSALMTTDCPEPLLQPWLESWHVEGPDRLRVSWSLPSVPLSGDGFLLRLWDGARGQERRENISFPQARTALLTGLTPGTHYQLDVRLYHCTLLGPASPPAHVHLPPSGPPAPRHLHAQALSDSEIQLMWQHPEAPSGPISKYIVEIQVAGGSGDPQWMDVDRPEETSIIVRGLNASTRYLFRVRASVQGLGDWSNTVEEATLGNGLQSEDPVRESRAAEEGLDQQLVLAVVGSVSATCLTILAALLALVCIRRSCLHRRRTFTYQSGSGEETILQFSSGTLTLTRRPKPQPEPLSYPVLEWEDITFEDLIGEGNFGQVIRAMIKKDGLKMNAAIKMLKEYASENDHRDFAGELEVLCKLGHHPNIINLLGACENRGYLYIAIEYAPYGNLLDFLRKSRVLETDPAFAREHGTASTLSSRQLLRFASDAANGMQYLSEKQFIHRDLAARNVLVGENLASKIADFGLSRGEEVYVKKTMGRLPVRWMAIESLNYSVYTTKSDVWSFGVLLWEIVSLGGTPYCGMTCAELYEKLPQGYRMEQPRNCDDEVYELMRQCWRDRPYERPPFAQIALQLGRMLEARKAYVNMSLFENFTYAGIDATAEEA

SEQ ID NO: 138 - protein, 219 aa, Homo sapiens
MASVTDGKHGVKDASDQNFDYMFKLLIIGNSSVGKTSFLLRYADDTFTPAFVSTVGIDFKVKTVYRHEKRVKLQIWDTAGQERYRTITTAYYRGAMGFILMYDITNEESFNAVQDWATQIKTYSWDNAQVILVGNKCDMEEERVVPTEKGQLLAEQLGFDFFEASAKENISVRQAFERLVDAICDKMSDSLDTDPSMLGSSKNTRLSDTPPLLQQNCSC

SEQ ID NO: 139 - protein, 417 aa, Homo sapiens
LNENQKLAVKRILSGDCRPLPYILFGPPGTGKTVTIIEAVLQVHFALPDSRILVCAPSNSAADLVCLRLHESKVLQPATMVRVGHFTHVFVDEAGQASEPECLIPLGLMSDISGQIVLAGDPMQLGPVIKSRLAMAYGLNVSFLERLMSRPAYQRDENAFGACGAHNPLLVTKLVKNYRSHEALLMLPSRLFYHRELEVCADPTVVTSLLGWEKLPKKGFPLIFHGVRGSEAREGKSPSWFNPAEAVQVLRYCCLLAHSISSQVSASDIGVITPYRKQVEKIRILLRNVDLMDIKVGSVEEFQGQEYLVIIISTVRSNEDRFEDDRYFLGFLSNSKRFNVAITRPKALLIVLGNPHVLVRDPCFGALLEYSITNGVYMGCDLPPALQSLQNCGEGVADPSYPVVPESTGPEKHQEPS

SEQ ID NO: 140 - protein, 382 aa, Homo sapiens
MSDSKCDSQFYSVQVADSTFTVLKRYQQLKPIGSGAQGIVCAAFDTVLGISVAVKKLSRPFQNQTHAKRAYRELVLLKCVNHKNIISLLNVFTPQKTLEEFQDVYLVMELMDANLCQVIHMELDHERMSYLLYQMLCGIKHLHSAGIIHRDLKPSNIVVKSDCTLKILDFGLARTACTNFMMTPYVVTRYYRAPEVILGMGYKENVDIWSVGCIMGELVKGCVIFQGTDHIDQWNKVIEQLGTPSAEFMKKLQPTVRNYVENRPKYPGIKFEELFPDWIFPSESERDKIKTSQARDLLSKMLVIDPDKRISVDEALRHPYITVWYDPAEAEAPPPQIYDAQLEEREHAIEEWKELIYKEVMDWEERSKNGVVKDQPSAQMQQ

SEQ ID NO: 141 - protein, 573 aa, Homo sapiens
MLRLPTVFRQMRPVSRVLAPHLTRAYAKDVKFGADARALMLQGVDLLADAVAVTMGPKGRTVIIEQSWGSPKVTKDGVTVAKSIDLKDKYKNIGAKLVQDVANNTNEEAGDGTTTATVLARSIAKEGFEKISKGANPVEIRRGVMLAVDAVIAELKKQSKPVTTPEEIAQVATISANGDKEIGNIISDAMKKVGRKGVITVKDGKTLNDELEIIEGMKFDRGYISPYFINTSKGQKCEFQDAYVLLSEKKISSIQSIVPALEIANAHRKPLVIIAEDVDGEALSTLVLNRLKVGLQVVAVKAPGFGDNRKNQLKDMAIATGGAVFGEEGLTLNLEDVQPHDLGKVGEVIVTKDDAMLLKGKGDKAQIEKRIQEIIEQLDVTTSEYEKEKLNERLAKLSDGVAVLKVGGTSDVEVNEKKDRVTDALNATRAAVEEGIVLGGGCALLRCIPALDSLTPANEDQKIGIEIIKRTLKIPAMTIAKNAGVEGSLIVEKIMQSSSEVGYDAMAGDFVNMVEKGIIDPTKVVRTALLDAAGVASLLTTAEVVVTEIPKEEKDPGMGAMGGMGGGMGGGMF

SEQ ID NO: 142 - protein, 655 aa, Homo sapiens
MERKVLALQARKKRTKAKKDKAQRKSETQHRGSAPHSESDLPEQEEEILGSDDDEQEDPNDYCKGGYHLVKIGDLFNGRYHVIRKLGWGHFSTVWLSWDIQGKKFVAMKVVKSAEHYTETALDEIRLLKSVRNSDPNDPNREMVVQLLDDFKISGVNGTHICMVFEVLGHHLLKWIIKSNYQGLPLPCVKKIIQQVLQGLDYLHTKCRIIHTDIKPENILLSVNEQYIRRLAAEATEWQRSGAPPPSGSAVSTAPQPKPADKMSKNKKKKLKKKQKRQAELLEKRMQEIEEMEKESGPGQKRPNKQEESESPVERPLKENPPNKMTQEKLEESSTIGQDQTLMERDTEGGAAEINCNGVIEVINYTQNSNNETLRHKEDLHNANDCDVQNLNQESSFLSLPNGDSSTSQETDSCTPITSEVSDTMVCQSSSTVGQSFSEQHISQLQESIRAEIPCEDEQEQEHNGPLDNKGKSTAGNFLVNPLEPKNAEKLKVKIADLGNACWVHKHFTEDIQTRQYRSLEVLIGSGYNTPADIWSTACMAFELATGDYLFEPHSGEEYTRDEDHIALIIELLGKVPRKLIVAGKYSKEFFTKKGDLKHITKLKPWGLFEVLVEKYEWSQEEAAGFTDFLLPMLELIPEKRATAAECLRHPWLNS

SEQ ID NO: 143 - protein, 760 aa, Homo sapiens
MMDQARSAFSNLFGGEPLSYTRFSLARQVDGDNSHVEMKLAVDEEENADNNTKANVTKPKRCSGSICYGTIAVIVFFLIGFMIGYLGYCKGVEPKTECERLAGTESPVREEPGEDFPAARRLYWDDLKRKLSEKLDSTDFTSTIKLLNENSYVPREAGSQKDENLALYVENQFREFKLSKVWRDQHFVKIQVKDSAQNSVIIVDKNGRLVYLVENPGGYVAYSKAATVTGKLVHANFGTKKDFEDLYTPVNGSIVIVRAGKITFAEKVANAESLNAIGVLIYMDQTKFPIVNAELSFFGHAHLGTGDPYTPGFPSFNHTQFPPSRSSGLPNIPVQTISRAAAEKLFGNMEGDCPSDWKTDSTCRMVTSESKNVKLTVSNVLKEIKILNIFGVIKGFVEPDHYVVVGAQRDAWGPGAAKSGVGTALLLKLAQMFSDMVLKDGFQPSRSIIFASWSAGDFGSVGATEWLEGYLSSLHLKAFTYINLDKAVLGTSNFKVSASPLLYTLIEKTMQNVKHPVTGQFLYQDSNWASKVEKLTLDNAAFPFLAYSGIPAVSFCFCEDTDYPYLGTTMDTYKELIERIPELNKVARAAAEVAGQFVIKLTHDVELNLDYERYNSQLLSFVRDLNQYRADIKEMGLSLQWLYSARGDFFRATSRLTTDFGNAEKTDRFVMKKLNDRVMRVEYHFLSPYVSPKESPFRHVFWGSGSHTLPALLENLKLRKQNNGAFNETLFRNQLALATWTIQGAANALSGDVWDIDNEF

SEQ ID NO: 144 - protein, 623 aa, Homo sapiens
MESYHKPDQQKLQALKDTANRLRISSIQATTAAGSGHPTSCCSAAEIMAVLFFHTMRYKSQDPRNPHNDRFVLSKGHAAPILYAVWAEAGFLAEAELLNLRKISSDLDGHPVPKQAFTDVATGSLGQGLGAACGMAYTGKYFDKASYRVYCLLGDGELSEGSVWEAMAFASIYKLDNLVAILDINRLGQSDPAPLQHQMDIYQKRCEAFGWHAIIVDGHSVEELCKAFGQAKHQPTAIIAKTFKGRGITGVEDKESWHGKPLPKNMAEQIIQEIYSQIQSKKKILATPPQEDAPSVDIANIRMPSLPSYKVGDKIATRKAYGQALAKLGHASDRIIALDGDTKNSTFSEIFKKEHPDRFIECYIAEQNMVSIAVGCATRNRTVPFCSTFAAFFTRAFDQIRMAAISESNINLCGSHCGVSIGEDGPSQMALEDLAMFRSVPTSTVFYPSDGVATEKAVELAANTKGICFIRTSRPENAIIYNNNEDFQVGQAKVVLKSKDDQVTVIGAGVTLHEALAAAELLKKEKINIRVLDPFTIKPLDRKLILDSARATKGRILTVEDHYYEGGIGEAVSSAVVGEPGITVTHLAVNRVPRSGKPAELLKMFGIDRDAIAQAVRGLITKA

SEQ ID NO: 145 - protein, 1252 aa, Homo sapiens
MSTTVNVDSLAEYEKSQIKRALELGTVMTVFSFRKSTPERRTVQVIMETRQVAWSKTADKIEGFLDIMEIKEIRPGKNSKDFERAKAVRQKEDCCFTILYGTQFVLSTLSLAADSKEDAVNWLSGLKILHQEAMNASTPTIIESWLRKQIYSVDQTRRNSISLRELKTILPLINFKVSSAKFLKDKFVEIGAHKDELSFEQFHLFYKKLMFEQQKSILDEFKKDSSVFILGNTDRPDASAVYLHDFQRFLIHEQQEHWAQDLNKVRERMTKFIDDTMRETAEPFLFVDEFLTYLFSRENSIWDEKYDAVDMQDMNNPLSHYWISSSHNTYLTGDQLRSESSPEAYIRCLRMGCRCIELDCWDGPDGKPVIYHGWTRTTKIKFDDVVQAIKDHAFVTSSFPVILSIEEHCSVEQQRHMAKAFKEVFGDLLLTKPTEASADQLPSPSQLREKIIIKHKKLGPRGDVDVNMEDKKDEHKQQGELYMWDSIDQKWTRHYCAIADAKLSFSDDIEQTMEEEVPQDIPPTELHFGEKWFHKKVEKRTSAEKLLQEYCMETGGKDGTFLVRESETFPNDYTLSFWRSGRVQHCRIRSTMEGGTLKYYLTDNLRFRRMYALIQHYRETHLPCAEFELRLTDPVPNPNPHESKPWYYDSLSRGEAEDMLMRIPRDGAFLIRKREGSDSYAITFRARGKVKHCRINRDGRHFVLGTSAYFESLVELVSYYEKHSLYRKMRLRYPVTPELLERYNTERDINSLYDVSRMYVDPSEINPSMPQRTVKALYDYKAKRSDELSFCRGALIHNVSKEPGGWWKGDYGTRIQQYFPSNYVEDISTADFEELEKQIIEDNPLGSLCRGILDLNTYNVVKAPQGKNQKSFVFILEPKEQGDPPVEFATDRVEELFEWFQSIREITWKIDSKENNMKYWEKNQSIAIELSDLVVYCKPTSKTKDNLENPDFREIRSFVETKADSIIRQKPVDLLKYNQKGLTRVYPKGQRVDSSNYDPFRLWLCGSQMVALNFQTADKYMQMNHALFSLNGRTGYVLQPESMRTEKYDPMPPESQRKILMTLTVKVLGARHLPKLGRSIACPFVEVEICGAEYGNNKFKTTVVNDNGLSPIWAPTQEKVTFEIYDPNLAFLRFVVYEEDMFSDPNFLAHATYPIKAVKSGFRSVPLKNGYSEDIELASLLVFCEMRPVLESEEELYSSCRQLRRRQEELNNQLFLYDTHQNLRNANRDALVKEFSVNENHSSCTRRNATRG

SEQ ID NO: 146 - protein, 327 aa, Homo sapiens
MTMESGAENQQSGDAAVTEAENQQMTVQAQPQIATLAQVSMPAAHATSSAPTVTLVQLPNGQTVQVHGVIQAAQPSVIQSPQVQTVQISTIAESEDSQESVDSVTDSQKRREILSRRPSYRKILNDLSSDAPGVPRIEEEKSEEETSAPAITTVTVPTPIYQTSSGQYIAITQGGAIQLANNGTDGVQGLQTLTMTNAAATQPGTTILQYAQTTDGQQILVPSNQVVVQAASGDVQTYQIRTAPTSTIAPGVVMASSPALPTQPAEEAARKREVRLMKNREAARECRRKKKEYVKCLENRVAVLENQNKTLIEELKALKDLYCHKSD

SEQ ID NO: 147 - protein, 984 aa, Homo sapiens
MERRWPLGLGLVLLLCAPLPPGARAKEVTLMDTSKAQGELGWLLDPPKDGWSEQQQILNGTPLYMYQDCPMQGRRDTDHWLRSNWIYRGEEASRVHVELQFTVRDCKSFPGGAGPLGCKETFNLLYMESDQDVGIQLRRPLFQKVTTVAADQSFTIRDLASGSVKLNVERCSLGRLTRRGLYLAFHNPGACVALVSVRVFYQRCPETLNGLAQFPDTLPGPAGLVEVAGTCLPHARASPRPSGAPRMHCSPDGEWLVPVGRCHCEPGYEEGGSGEACVACPSGSYRMDMDTPHCLTCPQQSTAESEGATICTCESGHYRAPGEGPQVACTGPPSAPRNLSFSASGTQLSLRWEPPADTGGRQDVRYSVRCSQCQGTAQDGGPCQPCGVGVHFSPGARALTTPAVHVNGLEPYANYTFNVEAQNGVSGLGSSGHASTSVSISMGHAESLSGLSLRLVKKEPRQLELTWAGSRPRSPGANLTYELHVLNQDEERYQMVLEPRVLLTELQPDTTYIVRVRMLTPLGPGPFSPDHEFRTSPPVSRGLTGGEIVAVIFGLLLGAALLLGILVFRSRRAQRQRQQRHVTAPPMWIERTSCAEALCGTSRHTRTLHREPWTLPGGWSNFPSRELDPAWLMVDTVIGEGEFGEVYRGTLRLPSQDCKTVAIKTLKDTSPGGQWWNFLREATIMGQFSHPHILHLEGVVTKRKPIMIITEFMENAALDAFLREREDQLVPGQLVAMLQGIASGMNYLSNHNYVHRDLAARNILVNQNLCCKVSDFGLTRLLDDFDGTYETQGGKIPIRWTAPEAIAHRIFTTASDVWSFGIVMWEVLSFGDKPYGEMSNQEVMKSIEDGYRLPPPVDCPAPLYELMKNCWAYDRARRPHFQKLQAHLEQLLANPHSLRTIANFDPRVTLRLPSLSGSDGIPYRTVSEWLESIRMKRYILHFHSAGLDTMECVLELTAEDLTQMGITLPGHQKRILCSIQGFKD

SEQ ID NO: 148 - protein, 205 aa, Homo sapiens
MTERRVPFSLLRGPSWDPFRDWYPHSRLFDQAFGLPRLPEEWSQWLGGSSWPGYVRPLPPAAIESPAVAAPAYSRALSRQLSSGVSEIRHTADRWRVSLDVNHFAPDELTVKTKDGVVEITGKHEERQDEHGYISRCFTRKYTLPPGVDPTQVSSSLSPEGTLTVEAPMPKLATQSNEITIPVTFESRAQLGGPEAAKSDETAAK

SEQ ID NO: 149 - protein, 238 aa, Homo sapiens
  MISC_FEATURE (210)..(210): "X  is unknown"
  MISC_FEATURE (217)..(217): "X  is unknown"
  MISC_FEATURE (223)..(223): "X  is unknown"
MFGVTLWEMFSGGEEPWAGVPPYLILQRLEDRARLPRPPLCSRALYSLALRCWAPHPSDRPSFSHLEGLLQEAGPSEACCVRDVTEPGALRMETGDPITVIEGSSSFHSPDSTIWKGQNGRTFKVGSFPASAVTLADAGGLPATRPVHRGHPCPGRSTPRKHRWRQKEGKSLGCAPSTGPEEEHAPGEDERHFQESGVSSVPRSSSHRGXVQAPLKXRQARAXAPGTSRPASTPTFIL

SEQ ID NO: 150 - protein, 220 aa, Homo sapiens
  MISC_FEATURE (210)..(210): "X is unknown"
  MISC_FEATURE (217)..(217): "X is unknown"
  MISC_FEATURE (223)..(223): "X is unknown"
MASATDSRYGQKESSDQNFDYMFKILIIGNSSVGKTSFLFRYADDSFTPAFVSTVGIDFKVKTIYRNDKRIKLQIWDTAGQERYRTITTAYYRGAMGFILMYDITNEESFNAVQDWSTQIKTYSWDNAQVLLVGNKCDMEDERVVSSERGRQLADHLGFEFFEASAKDNINVKQTFERLVDVICEKMSESLDTADPAVTGAKQGPQLSDQQVPPHQDCAC

SEQ ID NO: 151 - protein, 1124 aa, Homo sapiens
MAPPSEETPLIPQRSCSLLSTEAGALHVLLPARGPGPPQRLSFSFGDHLAEDLCVQAAKASGILPVYHSLFALATEDLSCWFPPSHIFSVEDASTQVLLYRIRFYFPNWFGLEKCHRFGLRKDLASAILDLPVLEHLFAQHRSDLVSGRLPVGLSLKEQGECLSLAVLDLARMAREQAQRPGELLKTVSYKACLPPSLRDLIQGLSFVTRRRIRRTVRRALRRVAACQADRHSLMAKYIMDLERLDPAGAAETFHVGLPGALGGHDGLGLLRVAGDGGIAWTQGEQEVLQPFCDFPEIVDISIKQAPRVGPAGEHRLVTVTRTDNQILEAEFPGLPEALSFVALVDGYFRLTTDSQHFFCKEVAPPRLLEEVAEQCHGPITLDFAINKLKTGGSRPGSYVLRRSPQDFDSFLLTVCVQNPLGPDYKGCLIRRSPTGTFLLVGLSRPHSSLRELLATCWDGGLHVDGVAVTLTSCCIPRPKEKSNLIVVQRGHSPPTSSLVQPQSQYQLSQMTFHKIPADSLEWHENLGHGSFTKIYRGCRHEVVDGEARKTEVLLKVMDAKHKNCMESFLEAASLMSQVSYRHLVLLHGVCMAGDSTMVQEFVHLGAIDMYLRKRGHLVPASWKLQVVKQLAYALNYLEDKGLPHGNVSARKVLLAREGADGSPPFIKLSDPGVSPAVLSLEMLTDRIPWVAPECLREAQTLSLEADKWGFGATVWEVFSGVTMPISALDPAKKLQFYEDRQQLPAPKWTELALLIQQCMAYEPVQRPSFRAVIRDLNSLISSDYELLSDPTPGALAPRDGLWNGAQLYACQDPTIFEERHLKYISQLGKGNFGSVELCRYDPLGDNTGALVAVKQLQHSGPDQQRDFQREIQILKALHSDFIVKYRGVSYGPGRQSLRLVMEYLPSGCLRDFLQRHRARLDASRLLLYSSQICKGMEYLGSRRCVHRDLAARNILVESEAHVKIADFGLAKLLPLDKDYYVVREPGQSPIFWYAPESLSDNIFSRQSDVWSFGVVLYELFTYCDKSCSPSAEFLRMMGCERDVPALCRLLELLEEGQRLPAPPACPAEVHELMKLCWAPSPQDRPSFSALGPQLDMLWSGSRGCETHAFTAHPEGKHHSLSFS

SEQ ID NO: 152 - protein, 393 aa, Homo sapiens [sequence omitted]

SEQ ID NO: 153 - protein, 473 aa, Homo sapiens
MLKVTVPSCSASSCSSVTASAAPGTASLVPDYWIDGSNRDALSDFFEVESELGRGATSIVYRCKQKGTQKPYALKVLKKTVDKKIVRTEIGVLLRLSHPNIIKLKEIFETPTEISLVLELVTGGELFDRIVEKGYYSERDAADAVKQILEAVAYLHENGIVHRDLKPENLLYATPAPDAPLKIADFGLSKIVEHQVLMKTVCGTPGYCAPEILRGCAYGPEVDMWSVGIITYILLCGFEPFYDERGDQFMFRRILNCEYYFISPWWDEVSLNAKDLVRKLIVLDPKKRLTTFQALQHPWVTGKAANFVHMDTAQKKLQEFNARRKLKAAVKAVVASSRLGSASSSHGSIQESHKASRDPSPIQDGNEDMKAIPEGEKIQGDGAQAAVKGAQAELMKVQALEKVKGADINAEEAPKMVPKAVEDGIKVADLELEEGLAEEKLKTVEEAAAPREGQGSSAVGFEVPQQDVILPEY

SEQ ID NO: 154 - protein, 215 aa, Homo sapiens
MASRGATRPNGPNTGNKICQFKLVLLGESAVGKSSLVLRFVKGQFHEFQESTIGAAFLTQTVCLDDTTVKFEIWDTAGQERYHSLAPMYYRGAQAAIVVYDITNEESFARAKNWVKELQRQASPNIVIALSGNKADLANKRAVDFQEAQSYADDNSLLFMETSAKTSMNVNEIFMAIAKKLPKNEPQNPGANSARGRGVDLTEPTQPTRNQCCSN

SEQ ID NO: 155 - protein, 1070 aa, Homo sapiens [sequence omitted]

SEQ ID NO: 156 - protein, 913 aa, Homo sapiens
MGPEALSSLLLLLLVASGDADMKGHFDPAKCRYALGMQDRTIPDSDISASSSWSDSTAARHSRLESSDGDGAWCPAGSVFPKEEEYLQVDLQRLHLVALVGTQGRHAGGLGKEFSRSYRLRYSRDGRRWMGWKDRWGQEVISGNEDPEGVVLKDLGPPMVARLVRFYPRADRVMSVCLRVELYGCLWRDGLLSYTAPVGQTMYLSEAVYLNDSTYDGHTVGGLQYGGLGQLADGVVGLDDFRKSQELRVWPGYDYVGWSNHSFSSGYVEMEFEFDRLRAFQAMQVHCNNMHTLGARLPGGVECRFRRGPAMAWEGEPMRHNLGGNLGDPRARAVSVPLGGRVARFLQCRFLFAGPWLLFSEISFISDVVNNSSPALGGTFPPAPWWPPGPPPTNFSSLELEPRGQQPVAKAEGSPTAILIGCLVAIILLLLLIIALMLWRLHWRRLLSKAERRVLEEELTVHLSVPGDTILINNRPGPREPPPYQEPRPRGNPPHSAPCVPNGSALLLSNPAYRLLLATYARPPRGPGPPTPAWAKPTNTQAYSGDYMEPEKPGAPLLPPPPQNSVPHYAEADIVTLQGVTGGNTYAVPALPPGAVGDGPPRVDFPRSRLRFKEKLGEGQFGEVHLCEVDSPQDLVSLDFPLNVRKGHPLLVAVKILRPDATKNARNDFLKEVKIMSRLKDPNIIRLLGVCVQDDPLCMITDYMENGDLNQFLSAHQLEDKAAEGAPGDGQAAQGPTISYPMLLHVAAQIASGMRYLATLNFVHRDLATRNCLVGENFTIKIADFGMSRNLYAGDYYRVQGRAVLPIRWMAWECILMGKFTTASDVWAFGVTLWEVLMLCRAQPFGQLTDEQVIENAGEFFRDQGRQVYLSRPPACPQGLYELMLRCWSRESEQRPPFSQLHRFLAEDALNTV

SEQ ID NO: 157 - DNA, 740 bp, Homo sapiens
agctggctggagcagcatcggtccgggacggtctctaggctgaggcggcggccgctcctctagttccacaatgtccacgggcggagacttcgggaatccgctgaggaaattcaagctggtgttcctgggggagcaaagcgttggaaagacatctttgatcaccagattcatgtatgacagttttgacaacacctatcaggcaacaattggcattgactttttatcaaaaactatgtacttggaggatcgaacagtacgattgcaattatgggacacagcaggtcaagagcggttcaggagcttgattcctagctacattcgtgactccactgtggcagttgttgtttatgatatcacaaatgttaactcattccagcaaactacaaagtggattgatgatgtcagaacagaaagaggaagtgatgttatcatcatgctagtaggaaataaaacagatcttgctgacaagaggcaagtgtcaattgaggagggagagaggaaagccaaagagctgaatgttatgtttattgaaactagtgcaaaagctggatacaatgtaaagcagctctttcgacgtgtagcagcagctttgccgggaatggaaagcacacaggacagaagcagagaagatatgattgacataaaactggaaaagcctcaggagcaaccagtcagtgaaggaggctgttcctgctaatgtccctagtcatcttcaaccttcttcagaagctcactgcttt

SEQ ID NO: 158 - DNA, 2366 bp, Homo sapiens
ggcctccccgcccgcctgcccctcggaggaggacgagagcctgaagggctgtgagctgtacgtgcagctgcacgggatccagcaggtcctcaaagactgtatcgtccacctctgcatctccaagcccgaacgccccatgaagttcctccgggagcacttcgagaagctggagaaggaagaaaacaggcagattttggcgcggcaaaagtcaaactcacagtcggactcccatgatgaggaggtgtcgcccacccccccgaaccctgtggtgaaggcccgccgccggcgaggaggcgtgagtgccgaggtgtacaccgaggaggacgccgtgtcctacgtcaggaaggtgattcccaaggactacaaaaccatgactgcgctggccaaggccatctccaagaacgtgctcttcgctcacctggatgacaacgagaggagtgacatattcgatgccatgttccctgtcactcacatcgctggggagactgttatacagcaagggaatgaaggagacaacttctatgtcgttgatcaaggggaagtggatgtgtacgtgaacggagagtgggtgaccaacatcagcgagggaggcagcttcggggagctggcgctcatctacggcacccccagggctgcgaccgtgaaagccaagacggacctcaagctctgggggatcgaccgggacagctaccggcgcatccttatgggcagcacgctgaggaaacgcaagatgtacgaggagttcctcagcaaggtctccatcctagagtccctggagaagtgggagcgtctgaccgtggcggatcggctggagcccgtccagtttgaagatggagagaaaattgtggtccagggagagcctggggacgacttttacatcatcacggagggcaccgcgtccgtgctgcagcgccggtcccccaatgaggagtacgtggaggtggggcgcctgggaccctctgactacttcggggagattgcactgctgctgaaccggccccgggcggccactgtcgtggcccgggggcccctcaagtgtgtgaagctggaccggccccgcttcgagcgtgtgctggggccctgctctgagatcctcaagaggaacattcagcgttacaacagcttcatctccctcaccgtctgagcacacgtcccgccctgcagccccagctccccagtgtggtggccgtgcctgctcgtctgtgtcgggggcccgggagccgctgtgtgaggtgtgggccgggtggggctgggtcccggcagcgtgaggactgccccttccccggactcactttttggaataaatgatcaccttgtgcatttccaaatcaaaggacaagcggacaaaatgcatcccaagatcaaggaagggacaggccagcttcctccccacacgcctccccggctgcctctgtgggcttctcctggggggcccaccccacccctgccagtctcctggagatgcttgaggatcggtcctccccagaaccaggccaggacgttgcccctggcggctggtgaccctgtgaggtcaggtcccccagattgaggtctgagtgtgggcaagtgtgtcaaaaggggctgccccccaggagatgaggctgagagcagggagttgaggccgaagaagtcaaggcccctcccgcaaatgtgtacccctgcccgcgccactgcaccccgccgcacccccacctccccgggggccctgctgcggatcgcggagtgggagagtctctgagctatgagattgatcttgcccctaattggagaggaagccgggcgccaagacacacggggctcctgccttgggagccagggccgcggccgcaggtagaccccagtagggggggccgggctcgaagttcctttgggaggggctggcgggactccagcaggccgtcctcacctttcttagaaagtccacccagggcaagttgatgttgggggaaagcagaagtcaagccagccgcggccccacacgccccgacccgctcaaccgacttgtcccttaaatgtgtcttggatcccgcagtgatgacgtgagccagccaggcccgaaagggtgaggccagtgcagagaagcttcccaggggattcctggttcccccgaaagacaagcgaggtcattgcagttcacccgatgttgctcctgtcccgtgcgtcccggggaggctgtccttggtccgcatggctcgttgcagcccctcccctgctggcggttacgatgcgtggggtccccctccccacccagccccggcaccgtcgccgtgtcccgcctgtgcctgtgacgtccctgtggacctgtgagccatcccccccttatctctgctctgaatactgcatgaagcattaaacgtgcaatgaag

SEQ ID NO: 159 - DNA, 1863 bp, Homo sapiens
gttttttttttttttttggtaccatagagttgctctgaaaacagaagatagagggagtctcggagctcgcatctccagcgatctctacattgggaaaaaacatggagtcagctccggcagcccccgaccccgccgccagcgagccaggcagcagcggcgcggacgcggccgccggctccagggagaccccgctgaaccaggaatccgcccgcaagagcgagccgcctgccccggtgcgcagacagagctattccagcaccagcagaggtatctcagtaacgaagaagacacatacatctcaaattgaaattattccatgcaagatctgtggagacaaatcatcaggaatccattatggtgtcattacatgtgaaggctgcaagggctttttcaggagaagtcagcaaagcaatgccacctactcctgtcctcgtcagaagaactgtttgattgatcgaaccagtagaaaccgctgccaacactgtcgattacagaaatgccttgccgtagggatgtctcgagatgctgtaaaatttggccgaatgtcaaaaaagcagagagacagcttgtatgcagaagtacagaaacaccggatgcagcagcagcagcgcgaccaccagcagcagcctggagaggctgagccgctgacgcccacctacaacatctcggccaacgggctgacggaacttcacgacgacctcagtaactacattgacgggcacacccctgaggggagtaaggcagactccgccgtcagcagcttctacctggacatacagccttccccagaccagtcaggtcttgatatcaatggaatcaaaccagaaccaatatgtgactacacaccagcatcaggcttctttccctactgttcgttcaccaacggcgagacttccccaactgtgtccatggcagaattagaacaccttgcacagaatatatctaaatcgcatctggaaacctgccaatacttgagagaagagctccagcagataacgtggcagacctttttacaggaagaaattgagaactatcaaaacaagcagcgggaggtgatgtggcaattgtgtgccatcaaaattacagaagctatacagtatgtggtggagtttgccaaacgcattgatggatttatggaactgtgtcaaaatgatcaaattgtgcttctaaaagcaggttctctagaggtggtgtttatcagaatgtgccgtgcctttgactctcagaacaacaccgtgtactttgatgggaagtatgccagccccgacgtcttcaaatccttaggttgtgaagactttattagctttgtgtttgaatttggaaagagtttatgttctatgcacctgactgaagatgaaattgcattattttctgcatttgtactgatgtcagcagatcgctcatggctgcaagaaaaggtaaaaattgaaaaactgcaacagaaaattcagctagctcttcaacacgtcctacagaagaatcaccgagaagatggaatactaacaaagttaatatgcaaggtgtctacattaagagccttatgtggacgacatacagaaaagctaatggcatttaaagcaatatacccagacattgtgcgacttcattttcctccattatacaaggagttgttcacttcagaatttgagccagcaatgcaaattgatgggtaaatgttatcacctaagcacttctagaatgtctgaagtacaaacatgaaaaacaaacaaaaaaattaaccgagacactttatatggccctgcacagacctggagcgccacacactgcacatcttttggtgatcggggtcaggcaaaggaggggaaacaatgaaaacaaataaagttgaacttgtttttctca

SEQ ID NO: 160 - DNA, 244 bp, Homo sapiens
actgggctccccggtctcccatcgcaaggacctgggtcgctctgagtccctccgcgtagtctgccggccacaccgcatcttccggccgtcgtatctcatccacggtgaggtgctgggcaagggctgcttcggctatgctatcaatgtgacatactgtgagacaggtgatgtgatggtgatgaaggagctgatccggttcgacgaggagacccagaggacgttcctcaacgaggtgaatgtcatt

SEQ ID NO: 161 - DNA, 2245 bp, Homo sapiens
ggagcaagaggtggttggggggggaccatggctgacgttttcccgggcaacgactccacggcgtctcaggacgtggccaaccgcttcgcccgcaaaggggcgctgaggcagaagaacgtgcacgaggtgaaggaccacaaattcatcgcgcgcttcttcaagcagcccaccttctgcagccactgcaccgacttcatctgggggtttgggaaacaaggcttccagtgccaagtttgctgttttgtggtccacaagaggtgccatgaatttgttactttttcttgtccgggtgcggataagggacccgacactgatgaccccaggagcaagcacaagttcaaaatccacacttacggaagccccaccttctgcgatcactgtgggtcactgctctatggacttatccatcaagggatgaaatgtgacacctgcgatatgaacgttcacaagcaatgcgtcatcaatgtccccagcctctgcggaatggatcacactgagaagagggggcggatttacctaaaggctgaggttgctgatgaaaagctccatgtcacagtacgagatgcaaaaaatctaatccctatggatccaaacgggctttcagatccttatgtgaagctgaaacttattcctgatcccaagaatgaaagcaagcaaaaaaccaaaaccatccgctccacactaaatccgcagtggaatgagtcctttacattcaaattgaaaccttcagacaaagaccgacgactgtctgtagaaatctgggactgggatcgaacaacaaggaatgacttcatgggatccctttcctttggagtttcggagctgatgaagatgccggccagtggatggtacaagttgcttaaccaagaagaaggtgagtactacaacgtacccattccggaaggggacgaggaaggaaacatggaactcaggcagaaattcgagaaagccaaacttggccctgctggcaacaaagtcatcagtccctctgaagacaggaaacaaccttccaacaaccttgaccgagtgaaactcacggacttcaatttcctcatggtgttgggaaaggggagttttggaaaggtgatgcttgccgacaggaagggcacagaagaactgtatgcaatcaaaatcctgaagaaggatgtggtgattcaggatgatgacgtggagtgcaccatggtagaaaagcgagtcttggccctgcttgacaaacccccgttcttgacgcagctgcactcctgcttccagacagtggatcggctgtacttcgtcatggaatatgtcaacggtggggacctcatgtaccacattcagcaagtaggaaaatttaaggaaccacaagcagtattctatgcggcagagatttccatcggattgttctttcttcataaaagaggaatcatttatagggatctgaagttagataacgtcatgttggattcagaaggacatatcaaaattgctgactttgggatgtgcaaggaacacatgatggatggagtcacgaccaggaccttctgtgggactccagattatatcgccccagagataatcgcttatcagccgtatggaaaatctgtggactggtgggcctatggcgtcctgttgtatgaaatgcttgccgggcagcctccatttgatggtgaagatgaagacgagctatttcagtctatcatggagcacaacgtttcctatccaaaatccttgtccaaggaggctgtttctatctgcaaaggactgatgaccaaacacccagccaagcggctgggctgtgggcctgagggggagagggacgtgagagagcatgccttcttccggaggatcgactgggaaaaactggagaacagggagatccagccaccattcaagcccaaagtgtgtggcaaaggagcagagaactttgacaagttcttcacacgaggacagcccgtcttaacaccacctgatcagctggttattgctaacatagaccagtctgattttgaagggttctcgtatgtcaacccccagtttgtgcaccccatcttacagagtgcagtatgaaactcaccagcgagaacaaacacctccccagcccccagccctccccgcagtggaagtgaatccttaaccctaaaattttaaggccacggcttgtgtctgattccatatggaggcctgaaaattgtagggttattagtccaaatgtgatcaactgttcagggtctctctcttacaaccaagaacattatcttagtggaag

SEQ ID NO: 162 - protein, 512 aa, Homo sapiens
MGCIKSKGKDSLSDDGVDLKTQPVRNTERTIYVRDPTSNKQQRPVPESQLLPGQRFQTKDPEEQGDIVVALYPYDGIHPDDLSFKKGEKMKVLEEHGEWWKAKSLLTKKEGFIPSNYVAKLNTLETEEWFFKDITRKDAERQLLAPGNSAGAFLIRESETLKGSFSLSVRDFDPVHGDVIKHYKIRSLDNGGYYISPRITFPCISDMIKHYQKQADGLCRRLEKACISPKPQKPWDKDAWEIPRESIKLVKRLGAGQFGEVWMGYYNNSTKVAVKTLKPGTMSVQAFLEEANLMKTLQHDKLVRLYAVVTREEPIYIITEYMAKGSLLDFLKSDEGGKVLLPKLIDFSAQIAEGMAYIERKNYIHRDLRAANVLVSESLMCKIADFGLARVIEDNEYTAREGAKFPIKWTAPEAINFGCFTIKSDVWSFGILLYEIVTYGKIPYPGRTNADVMTALSQGYRMPRVENCPDELYDIMKMCWKEKAEERPTFDYLQSVLDDFYTATEGQYQQQP

SEQ ID NO: 163 - DNA, 8287 bp, Homo sapiens
ctgattatgaagtgcctcagagccaacctattaagcttggagatcatctcaacagcatactgcttggaatgtgtgaggatgttatttacgctcgagtttctgttcggactgtgctggatgcttgcagtgcccacattaggaatagcaattgtgcaccctcattttcctacgtgaaacacttggtaaaactggttctgggaaatctttctggggtaatatgcacgtgtcactagctgaggccctggaggttcggggtggaccacttcaggaggaagaaatatgggctgtattaaatcaaagtgctgaaagtctccaagaattattcagaaaagtaagcctagctgatcctgctgcccttggcttcatcatttctccatggtctctgctgttgctgccatctggtagtgtgtcatttacagatgaaaatatttccaatcaggatcttcgagcattcactgcaccagaggttcttcaaaatcagtcactaacttctctctcagatgttgaaaagatccacatttattctcttggaatgacactgtattggggggctgattatgaagtgcctcagagccaacctattaagcttggagatcatctcaacagcatactgcttggaatgtgtgaggatgttatttacgctcgagtttctgttcggactgtgctggatgcttgcagtgcccacattaggaatagcaattgtgcaccctcattttcctacgtgaaacacttggtaaaactggttctgggaaatctttctgggacagatcagctttcctgtaacagtgaacaaaagcctgatcgaagccaggctattcgagatcgattgcgaggaaaaggattaccaacaggaagaagctctacttctgatgtactagacatacaaaagcctccactctctcatcagacctttcttaacaaagggcttagtaaatctatgggatttctgtccatcaaagatacacaagatgagaattatttcaaggacattttatcagataattctggacgtgaagattctgaaaatacattctccccttaccagttcaaaactagtggcccagaaaaaaaacccatccctggcattgatgtgctttctaagaagaagatctgggcttcatccatggacttgctttgtacagctgacagagacttctcttcaggagagactgccacatatcgtcgttgtcaccctgaggcagtaacagtgcggacttcaactactcctagaaaaaaggaggcaagatactcagatggaagtatagccttggatatctttggccctcagaaaatggatccaatatatcacactcgagaattgcccacctcctcagcaatatcaagtgctttggaccgaatccgagagagacaaaagaaacttcaggttctgagggaagccatgaatgtagaagaaccagttcgaagatacaaaacttatcatggtgatgtctttagtacctccagtgaaagtccatctattatttcctctgaatcagatttcagacaagtgagaagaagtgaagcctcaaagaggtttgaatccagcagtggtctcccaggggtagatgaaaccttaagtcaaggccagtcacagagaccgagcagacaatatgaaacaccctttgaaggcaacttaattaatcaagagatcatgctaaaacggcaagaggaagaactgatgcagctacaagccaaaatggcccttagacagtctcggttgagcctatatccaggagacacaatcaaagcgtccatgcttgacatcaccagggatccgttaagagaaattgccctagaaacagccatgactcaaagaaaactgaggaatttctttggccctgagtttgtgaaaatgacaattgaaccatttatatctttggatttgccacggtctattcttactaagaaagggaagaatgaggataaccgaaggaaagtaaacataatgcttctgaacgggcaaagactggaactgacctgtgataccaaaactatatgtaaagatgtgtttgatatggttgtggcacatattggcttagtagagcatcatttgtttgctttagctaccctcaaagataatgaatatttctttgttgatcctgacttaaaattaaccaaagtggccccagagggatggaaagaagaaccaaagaaaaagaccaaagccactgttaattttactttgtttttcagaattaaattttttatggatgatgttagtctaatacaacatactctgacgtgtcatcagtattaccttcagcttcgaaaagatattttggaggaaaggatgcactgtgatgatgagacttccttattgctggcatccttggctctccaggctgagtatggagattatcaaccagaggttcatggtgtgtcttactttagaatggagcactatttgcccgccagagtgatggagaaacttgatttatcctatatcaaagaagagttacccaaattgcataatacctatgtgggagcttctgaaaaagagacagagttagaatttttaaaggtctgccaaagactgacagaatatggagttcattttcaccgagtgcaccctgagaagaagtcacaaacaggaatattgcttggagtctgttctaaaggtgtccttgtgtttgaagttcacaatggagtgcgcacattggtccttcgctttccatggagggaaaccaagaaaatatctttttctaaaaagaaaatcacattgcaaaatacatcagatggaataaaacatggcttccagacagacaacagtaagatatgccagtacctgctgcacctctgctcttaccagcataagttccagctacagatgagagcaagacagagcaaccaagatgcccaagatattgagagagcttcgtttaggagcctgaatctccaagcagagtctgttagaggatttaatatgggacgagcaatcagcactggcagtctggccagcagcaccctcaacaaacttgctgttcgacctttatcagttcaagctgagattctgaagaggctatcctgctcagagctgtcgctttaccagccattgcaaaacagttcaaaagagaagaatgacaaagcttcatgggaggaaaagcctagagagatgagtaaatcataccatgatctcagtcaggcctctctctatccacatcggaaaaatgtcattgttaacatggaacccccaccacaaaccgttgcagagttggtgggaaaaccttctcaccagatgtcaagatctgatgcagaatctttggcaggagtgacaaaacttaataattcaaagtctgttgcgagtttaaatagaagtcctgaaaggaggaaacatgaatcagactcctcatccattgaagaccctgggcaagcatatgttctaggaatgactatgcatagttctggaaactcttcatcccaagtacccttaaaagaaaatgatgtgctacacaaaagatggagcatagtatcttcaccagaaagggagatcaccttagtgaacctgaaaaaagatgcaaagtatggcttgggatttcaaattattggtggggagaagatgggaagactggacctaggcatatttatcagttcagttgcccctggaggaccagctgacttggatggatgcttgaagccaggagaccgtttgatatctgtgaatagtgtgagtctggagggagtcagccaccatgctgcaattgaaattttgcaaaatgcacctgaagatgtgacacttgttatctctcagccaaaagaaaagatatccaaagtgccttctactcctgtgcatctcaccaatgagatgaaaaactacatgaagaaatcttcctacatgcaagacagtgctatagattcttcttccaaggatcaccactggtcacgtggtaccctgaggcacatctcggagaactcctttgggccgtctgggggcctgcgggaaggaagcctgagttctcaagattccaggactgagagtgccagcttgtctcaaagccaggtcaatggtttctttgccagccatttaggtgaccaaacctggcaggaatcacagcatggcagcccttccccatctgtaatatccaaagccaccgagaaagagactttcactgatagtaaccaaagcaaaactaaaaagccaggcatttctgatgtaactgattactcagaccgtggagattcagacatggatgaagccacttactccagcagtcaggatcatcaaacaccaaaacaggaatcttcctcttcagtgaatacatccaacaagatgaattttaaaactttttcttcatcacctcctaagcctggagatatctttgaggttgaactggctaaaaatgataacagcttggggataagtgtcacggtactgtttgacaagggaggtgtgaatacgagtgtcagacatggtggcatttatgtgaaagctgttattccccagggagcagcagagtctgatggtagaattcacaaaggtgatcgcgtcctagctgtcaatggagttagtctagaaggagccacccataagcaagctgtggaaacactgagaaatacaggacaggtggttcatctgttattagaaaagggacaatctccaacatctaaagaacatgtcccggtaaccccacagtgtaccctttcagatcagaatgcccaaggtcaaggcccagaaaaagtgaagaaaacaactcaggtcaaagactacagctttgtcactgaagaaaatacatttgaggtaaaattatttaaaaatagctcaggtctaggattcagtttttctcgagaagataatcttataccggagcaaattaatgccagcatagtaagggttaaaaagctctttcctggacagccagcagcagaaagtggaaaaattgatgtaggagatgttatcttgaaagtgaatggagcctctttgaaaggactatctcagcaggaagtcatatctgctctcaggggaactgctccagaagtattcttgcttctctgcagacctccacctggtgtgctaccggaaattgatactgcgcttttgaccccacttcagtctccagcacaagtacttccaaacagcagtaaagactcttctcagccatcatgtgtggagcaaagcaccagctcagatgaaaatgaaatgtcagacaaaagcaaaaaacagtgcaagtccccatccagaagagacagttacagtgacagcagtgggagtggagaagatgacttagtgacagctccagcaaacatatcaaattcgacctggagttcagctttgcatcagactctaagcaacatggtatcacaggcacagagtcatcatgaagcacccaagagtcaagaagataccatttgtaccatgttttactatcctcagaaaattcccaataaaccagagtttgaggacagtaatccttcccctctaccaccggatatggctcctgggcagagttatcaaccccaatcagaatctgcttcctctagttcgatggataagtatcatatacatcacatttctgaaccaactagacaagaaaactggacacctttgaaaaatgacttggaaaatcaccttgaagactttgaactggaagtagaactcctcattaccctaattaaatcagaaaaaggaagcctgggttttacagtaaccaaaggcaatcagagaattggttgttatgttcatgatgtcatacaggatccagccaaaagtgatggaaggctaaaacctggggaccggctcataaaggttaatgatacagatgttactaatatgactcatacagatgcagttaatctgctccgggctgcatccaaaacagtcagattagttattggacgagttctagaattacccagaataccaatgttgcctcatttgctaccggacataacactaacgtgcaacaaagaggagttgggtttttccttatgtggaggtcatgacagcctttatcaagtggtatatattagtgatattaatccaaggtccgtcgcagccattgagggtaatctccagctattagatgtcatccattatgtgaacggagtcagcacacaaggaatgaccttggaggaagttaacagagcattagacatgtcacttccttcattggtattgaaagcaacaagaaatgatcttccagtggtccccagctcaaagaggtctgctgtttcagctccaaagtcaaccaaaggcaatggttcctacagtgtggggtcttgcagccagcctgccctcactcctaatgattcattctccacggttgctggggaagaaataaatgaaatatcgtaccccaaaggaaaatgttctacttatcagataaagggatcaccaaacttgactctgcccaaagaatcttatatacaagaagatgacatttatgatgattcccaagaagctgaagttatccagtctctgctggatgttgtggatgaggaagcccagaatcttttaaacgaaaataatgcagcaggatactcctgtggtccaggtacattaaagatgaatgggaagttatcagaagagagaacagaagatacagactgcgatggttcacctttacctgagtattttactgaggccaccaaaatgaatggctgtgaagaatattgtgaagaaaaagtaaaaagtgaaagcttaattcagaagccacaagaaaagaagactgatgatgatgaaataacatggggaaatgatgagttgccaatagagagaacaaaccatgaagattctgataaagatcattcctttctgacaaacgatgagctcgctgtactccctgtcgtcaaagtgcttccctctggtaaatacacgggtgccaacttaaaatcagtcattcgagtcctgcggggtttgctagatcaaggaattccttctaaggagctggagaatcttcaagaattaaaacctttggatcagtgtctaattgggcaaactaaggaaaacagaaggaagaacagatataaaaatatacttccctatgatgctacaagagtgcctcttggagatgaaggtggctatatcaatgccagcttcattaagataccagttgggaaagaagagttcgtttacattgcctgccaaggaccactgcctacaactgttggagacttctggcagatgatttgggagcaaaaatccacagtgatagccatgatgactcaagaagtagaaggagaaaaaatcaaatgccagcgctattggcccaacatcctaggcaaaacaacaatggtcagcaacagacttcgactggctcttgtgagaatgcagcagctgaagggctttgtggtgagggcaatgacccttgaagatattcagaccagagaggtgcgccatatttctcatctgaatttcactgcctggccagaccatgatacaccttctcaaccagatgatctgcttacttttatctcctacatgagacacatccacagatcaggcccaatcattacgcactgcagtgctggcattggacgttcagggaccctgatttgcatagatgtggttctgggattaatcagtcaggatcttgattttgacatctctgatttggtgcgctgcatgagactacaaagacacggaatggttcagacagaggatcaatatattttctgctatcaagtcatcctttatgtcctgacacgtcttcaagcagaagaagagcaaaaacagcagcctcagcttctgaagtgacatgaaaagagcctctggatgcatttccatttctctccttaacctccagcagactcctgctctctatccaaaataagatcacagagcagcaagttcatacaacatgcatgttctcctctatcttagaggggtattcttcttgaaaataaaaaatattgaaatgctgtatttttacagctactttaacctatgataattatttacaaaattttaacactaaccaaacaatgcagatcttagggatgattaaaggcagcatttgatgatagcagacattgttacaaggacatggtgagtctatttttaatgcaccaatcttgtttatagcaaaaatgttttccaatattttaataaagtagttattttataggggatacttgaaaccagtatttaagctttaaatgacagtaatattggcatagaaaaaagtagcaaatgtttactgtatcaatttctaatgtttactatatagaatttcctgtaatatatttatatactttttcatgaaaatggagttatcagttatctgtttgttactgcatcatctgtttgtaatcattatctcactttgtaaataaaaacacaccttaaaacatg

SEQ ID NO: 164 - protein, 152 aa, Homo sapiens [sequence omitted]

SEQ ID NO: 165 - protein, 168 aa, Homo sapiens
MAAESLPFSSDTVSWELEAWYEDLQEVLSSDENGGTYVSPPGNEEEESKIFTTLDPASLAWLTEEEPEPAEVTSTSQSPHSPDSSQSSLAQEEEEEDQGRTRKRKQSGHSPARAGKQRMKEKEQENERKVAQLAEENERLKQEIERLTREVEATRRALIDRMVNLHQA

SEQ ID NO: 166 - protein, 217 aa, Homo sapiens [sequence omitted]

SEQ ID NO: 167 - protein, 222 aa, Homo sapiens
MAEKPKLHYFNARGRMESTRWLLAAAGVEFEEKFIKSAEDLDKLRNDGYLMFQQVPMVEIDGMKLVQTRAILNYIASKYNLYGKDIKERALIDMYIEGIADLGEMILLLPVCPPEEKDAKLALIKEKIKNRYFPAFEKVLKSHGQDYLVGNKLSRADIHLVELLYYVEELDSSLISSFPLLKALKTRISNLPTVKKFLQPGSPRKPPMDEKSLEEARKIFRF

SEQ ID NO: 168 - protein, 89 aa, Homo sapiens
MCDRKAVIKNADMSEEMQQDSVECATQALEKYNIEKDIAAHIKKEFDKKYNPTWHCIVGRNFGSYVTHETKHFIYFYLGQVAILLFKSG

SEQ ID NO: 169 - protein, 732 aa, Homo sapiens
MVRSGNKAAVVLCMDVGFTMSNSIPGIESPFEQAKKVITMFVQRQVFAENKDEIALVLFGTDGTDNPLSGGDQYQNITVHRHLMLPDFDLLEDIESKIQPGSQQADFLDALIVSMDVIQHETIGKKFEKRHIEIFTDLSSRFSKSQLDIIIHSLKKCDISLQFFLPFSLGKEDGSGDRGDGPFRLGGHGPSFPLKGITEQQKEGLEIVKMVMISLEGEDGLDEIYSFSESLRKLCVFKKIERHSIHWPCRLTIGSNLSIRIAAYKSILQERVKKTWTVVDAKTLKKEDIQKETVYCLNDDDETEVLKEDIIQGFRYGSDIVPFSKVDEEQMKYKSEGKCFSVLGFCKSSQVQRRFFMGNQVLKVFAARDDEAAAVALSSLIHALDDLDMVAIVRYAYDKRANPQVGVAFPHIKHNYECLVYVQLPFMEDLRQYMFSSLKNSKKYAPTEAQLNAVDALIDSMSLAKKDEKTDTLEDLFPTTKIPNPRFQRLFQCLLHRALHPREPLPPIQQHIWNMLNPPAEVTTKSQIPLSKIKTLFPLIEAKKKDQVTAQEIFQDNHEDGPTAKKLKTEQGGAHFSVSSLAEGSVTSVGSVNPAENFRVLVKQKKASFEEASNQLINHIEQFLDTNETPYFMKSIDCIRAFREEAIKFSEEQRFNNFLKALQEKVEIKQLNHFWEIVVQDGITLITKEEASGSSVTAEEAKKFLAPKDKPSGDTAAVFEEGGDVDDLLDMI

SEQ ID NO: 170 - protein, 363 aa, Homo sapiens
MAVTITLKTLQQQTFKIRMEPDETVKVLKEKIEAEKGRDAFPVAGQKLIYAGKILSDDVPIRDYRIDEKNFVVVMVTKTKAGQGTSAPPEASPTAAPESSTSFPPAPTSGMSHPPPAAREDKSPSEESAPTTSPESVSGSVPSSGSSGREEDAASTLVTGSEYETMLTEIMSMGYERERVVAALRASYNNPHRAVEYLLTGIPGSPEPEHGSVQESQVSEQPATEAAGENPLEFLRDQPQFQNMRQVIQQNPALLPALLQQLGQENPQLLQQISRHQEQFIQMLNEPPGELADISDVEGEVGAIGEEAPQMNYIQVTPQEKEAIERLKALGFPESLVIQAYFACEKNENLAANFLLSQNFDDE

SEQ ID NO: 171 - protein, 233 aa, Homo sapiens [sequence omitted]

SEQ ID NO: 172 - protein, 266 aa, Homo sapiens [sequence omitted]

SEQ ID NO: 173 - protein, 568 aa, Homo sapiens [sequence omitted]

SEQ ID NO: 174 - protein, 235 aa, Homo sapiens
MTVLAPAWSPTTYLLLLLLLSSGLSGTQDCSFQHSPISSDFAVKIRELSDYLLQDYPVTVASNLQDEELCGALWRLVLAQRWMERLKTVAGSKMQGLLERVNTEIHFVTKCAFQPPPSCLRFVQTNISRLLQETSEQLVALKPWITRQNFSRCLELQCQPDSSTLPPPWSPRPLEATAPTAPQPPLLLLLLLPVGLLLLAAAWCLHWQRTRRRTPRPGEQVPPVPSPQDLLLVEH

SEQ ID NO: 175 - protein, 633 aa, Homo sapiens
MPEIRLRHVVSCSSQDSTHCAENLLKADTYRKWRAAKAGEKTISVVLQLEKEEQIHSVDIGNDGSAFVEVLVGSSAGGAGEQDYEVLLVTSSFMSPSESRSGSNPNRVRMFGPDKLVRAAAEKRWDRVKIVCSQPYSKDSPFGLSFVRFHSPPDKDEAEAPSQKVTVTKLGQFRVKEEDESANSLRPGALFFSRINKTSPVTASDPAGPSYAAATLQASSAASSASPVSRAIGSTSKPQESPKGKRKLDLNQEEKKTPSKPPAQLSPSVPKRPKLPAPTRTPATAPVPARAQGAVTGKPRGEGTEPRRPRAGPEELGKILQGVVVVLSGFQNPFRSELRDKALELGAKYRPDWTRDSTHLICAFANTPKYSQVLGLGGRIVRKEWVLDCHRMRRRLPSRRYLMAGPGSSSEEDEASHSGGSGDEAPKLPQKQPQTKTKPTQAAGPSSPQKPPTPEETKAASPVLQEDIDIEGVQSEGQDNGAEDSGDTEDELRRVAEQKEHRLPPGQEENGEDPYAGSTDENTDSEEHQEPPDLPVPELPDFFQGKHFFLYGEFPGDERRKLIRYVTAFNGELEDYMSDRVQFVITAQEWDPSFEEALMDNPSLAFVRPRWIYSCNEKQKLLPHQLYGVVPQA

SEQ ID NO: 176 - DNA, 1645 bp, Homo sapiens
gaattccggtaaggagagtgcggcgcttcccgaggcgtgcagctgggaactgcaactcatctgggttgtgcgcagaaggctggggcaagcgagtagagaagtggagcgtaagccagggggcttgggggccgtgcgggcgggtcgcgtgcagccccgcggggtgaagtcggagcgcggggcctgctggagagaggagcgctgcgaccgagtaatggcaatgcagatgcagcttgaagcaaatgcagatacttcagtggaagaagaaagctttggcccacaacccatttcacggttagagcagtgtggcataaatgccaacgatgtgaagaaattggaagaagctggattccatactgtggaggctgttgcctatgcgccaaagaaggagctaataaatattaagggaattagtgaagccaaagctgataaaattctggctgaggcagctaaattagttccaatgggtttcaccactgcaactgaattccaccaaaggcggtcagagatcatacagattactactggctccaaagagcttgacaaactacttcaaggtggaattgagactggatctatcacagaaatgtttggagaattccgaactgggaagacccagatctgtcatacgctagctgtcacctgccagcttcccattgaccggggtggaggtgaaggaaaggccatgtacattgacactgagggtacctttaggccagaacggctgctggcagtggctgagaggtatggtctctctggcagtgatgtcctggataatgtagcatatgctcgagcgttcaacacagaccaccagacccagctcctttatcaagcatcagccatgatggtagaatctaggtatgcactgcttattgtagacagtgccaccgccctttacagaacagactactcgggtcgaggtgagctttcagccaggcagatgcacttggccaggtttctgcggatgcttctgcgactcgctgatgagtttggtgtagcagtggtaatcactaatcaggtggtagctcaagtggatggagcagcgatgtttgctgctgatcccaaaaaacctattggaggaaatatcatcgcccatgcatcaacaaccagattgtatctgaggaaaggaagaggggaaaccagaatctgccaaatctacgactctccctgtcttcctgaagctgaagctatgttcgccattaatgcagatggagtgggagatgccaaagactgaatcattgggtttttcctctgttaaaaaccttaagtgctgcagcctaatgagagtgcactgctccctggggttctctacaggcctcttcctgttgtgactgccaggataaagcttccgggaaaacagctattatatcagcttttctgatggtataaacaggagacaggtcagtagtcacaaactgatctaaaatggtttattccttctgtagtgtattaatctctgtgtgttttctttggttttggaggagggtatgaagtatctttgacatggtgccttaggaatgacttgggtttaacaagctgtctactggacaatcttatgtttccaagagaactaaagctggagagacctgacccttctctcacttctaaattaatggtaaaataaaagtcctcagctatgtagcaaagg

SEQ ID NO: 177 - DNA, 460 bp, Homo sapiens
aggaggtgcaggagaacagaagtgtgccctgtgctcttctgagcagagaagcaccatgagctggggcaggcaaaccccactggggctggcatggctcgctggggctggcacgtggagggaagtgctgcctccccaggcctctgctttaatgatcagcttagtcactggtgtgactgtgccctgggctattgcctgaggtgaaacctttacctgctccctggtctatcttggtagaattgatctatttcaaaggtatacagctaagcagattcttatttctgagaataccacctgtgtggcacctcctttccagctcctcagggaatgtgagacatgtgaggagctgccacactccttgccagtagtcacaggaaagggtggttaacaagttaaagtaaccaagaggaatatgtgtgttgagtcagctgatggcgtttgcaagtggaatgtccttcttacc

SEQ ID NO: 178 - DNA, 3422 bp, Homo sapiens
ccacgcgtccggcagcctgtatgagcaagtgccgaggcctacggtgagcgccggagccggagaggcagctatatgtctttggctttcaagatcttctttccacaaaccctccgtgcactcagccgaaaagaactgtgcctattccgaaaacatcactggcgtgatgtaagacaattcagccagtggtcagaaacagatctgcttcatggacatcccctcttcctgagaagaaagcctgttctatcattccagggaagccatctaagatcacgtgccacctaccttgttttcttgccagggttgcatgtgggactctgcagtggcccctgtgagatggctgagcaacggttctgtgtggactatgccaagcgtggcacagctggctgcaaaaaatgcaaggaaaagattgtgaagggcgtatgccgaattggcaaagtggtgcccaatcccttctcagagtctgggggtgatatgaaagagtggtaccacattaaatgcatgtttgagaaactagagcgggcccgggccaccacaaaaaaaatcgaggacctcacagagctggaaggctgggaagagctggaagataatgagaaggaacagataacccagcacattgcagatctgtcttctaaggcagcaggtacaccaaagaagaaagctgttgtccaggctaagttgacaaccactggccaggtgacttctccagtgaaaggcgcctcatttgtcaccagtaccaatccccggaaattttctggcttttcagccaagcccaacaactctggggaagccccctcgagccccacccctaagagaagtctgtcttcaagcaaatgtgaccccaggcataaggactgtctgctacgggagtttcgaaagttatgcgccatggtggccgataatcctagctacaacacgaagacccagatcatccaggacttccttcggaaaggctcagcaggagatggtttccacggtgatgtgtacctaacagtgaagctgctgctgccaggagtcattaagactgtttacaacttgaacgataagcagattgtgaagcttttcagtcgcatttttaactgcaacccagatgatatggcacgggacctagagcagggtgacgtgtcagagacaatcagagtcttctttgagcagagcaagtctttccccccagctgccaagagcctccttaccatccaggaagtggatgagttccttctgcggctgtccaagctcaccaaggaggatgagcagcaacaggccctacaggacattgcctccaggtgtacagccaatgaccttaaatgcatcatcaggttgatcaaacatgatctgaagatgaactcaggtgcaaaacatgtgttagacgcccttgaccccaatgcctatgaagccttcaaagcctcgcgcaacctgcaggatgtggtggagcgggtccttcacaacgcgcaggaggtggagaaggagccgggccagagacgagctctgagcgtccaggcctcgctgatgacacctgtgcagcccatgttggcggaggcctgcaagtccgttgagtatgcaatgaagaaatgtcccaatggcatgttctctgagatcaagtacgatggagagcgagtccaggtgcataagaatggagaccacttcagctacttcagccgcagtctcaagcccgtccttcctcacaaggtggcccactttaaggactacattccccaggcttttcctgggggccacagcatgatcttggattctgaagtgcttctgattgacaacaagacaggcaaaccactgccctttgggactctgggagtacacaagaaagcagccttccaggatgctaatgtctgcctgtttgtttttgattgtatctactttaatgatgtcagcttgatggacagacctctgtgtgagcggcggaagtttcttcatgacaacatggttgaaattccaaaccggatcatgttctcagaaatgaagcgagtcacaaaagctttggacttggctgacatgataacccgggtgatccaggagggattggaggggctggtgctgaaggatgtgaagggtacatatgagcctgggaagcggcactggctgaaagtgaagaaagactatttgaacgagggggccatggccgacacagctgacctggtggtccttggagccttctatgggcaagggagcaaaggcggcatgatgtcaatcttcctcatgggctgctacgaccctggcagccagaagtggtgcacagtcaccaagtgtgcaggaggccatgatgatgccacgcttgcccgcctgcagaatgaactagacatggtgaagatcagcaaggaccccagcaaaatacccagctggttgaaggtcaacaagatctactatcctgacttcatcgtcccagacccaaagaaagctgccgtgtgggagatcacaggggctgaattctccaaatcggaggctcatacagctgacgggatctccatccgattccctcgctgcacccgaatccgagatgataaggactggaaatctgccactaaccttccccaactcaaggaactgtaccagttgtccaaggagaaggcagacttcactgtagtggctggagatgaggggagctccactacagggggtagcagtgaagagaataagggtccctcagggtctgctgtgtcccgcaaggcccccagcaagccctcagccagtaccaagaaagcagaagggaagctgagtaactccaacagcaaagatggcaacatgcagactgcaaagccttccgctatgaaggtgggggagaagctggccacaaagtcttctccagtgaaagtaggggagaagcggaaagctgctgatgagacgctgtgccaaacaaaggtattgctggacatcttcactggggtgcggctttacttgccaccctccacaccagacttcagccgtctcagacgctactttgtggcattcgacggggacctggtacaggaatttgatatgacttcagccacgcacgtgctgggtagcagggacaagaaccctgcggcccagcaggtctccccagagtggatttgggcatgtatccggaaacggagactggtagctccctgctaggtttgctgtcttccctctccctcaggccatactctcctttaccatactattggactggactcaggctggaggcagatagacacagtatagggggaatgggcttgcttctcccaaacccaccagttctccactgtctcttctggaccaggaattagttgctgtgggtgccacagctgaagtcagtttgtcttgctggtttaaatagatctttcagagctgggtgctgggtttgccatctttttgttttctttgaaaagcagcttagttaccctttttataaataaaatatcttgcagttaaaaaaaaaaaaaaaaaaaaaa

SEQ ID NO: 179 - protein, 1572 aa, Homo sapiens
MSTPTDPGAMPHPGPSPGPGPSPGPILGPSPGPGPSPGSVHSMMGPSPGPPSVSHPMPTMGSTDFPQEGMHQMHKPIDGIHDKGIVEDIHCGSMKGTGMRPPHPGMGPPQSPMDQHSQGYMSPHPSPLGAPEHVSSPMSGGGPTPPQMPPSQPGALIPGDPQAMSQPNRGPSPFSPVQLHQLRAQILAYKMLARGQPLPETLQLAVQGKRTLPGLQQQQQQQQQQQQQQQQQQQQQQQPQQQPPQPQTQQQQQPALVNYNRPSGPGPELSGPSTPQKLPVPAPGGRPSPAPPAAAQPPAAAVPGPSVPQPAPGQPSPVLQLQQKQSRISPIQKPQGLDPVEILQEREYRLQARIAHRIQELENLPGSLPPDLRTKATVELKALRLLNFQRQLREEVVACMRRDTTLETALNSKAYKRSKRQTLREARMTEKLEKQQKIEQERKRRQKHQEYLNSILQHAKDFKEYHRSVAGKIQKLSKAVATWHANTEREQKKETERIEKERMRRLMAEDEESYRKLIDQKKDRRLAYLLQQTDEYVANLTNLVWEHKQAQAAKEKKKRRRRKKKAEENAEGGESALGPDGEPIDESSQMSDLPVKVTHTETGKVLFGPEAPKASQLDAWLEMNPGYEVAPRSDSEESDSDYEEEDEEEESSRQETEEKILLDPNSEEVSEKDAKQIIETAKQDVDDEYSMQYSARGSQSYYTVAHAISERVEKQSALLINGTLKHYQLQGLEWMVSLYNNNLNGILADEMGLGKTIQTIALITYLMEHKRLNGPYLIIVPLSTLSNWTYEFDKWAPSVVKISYKGTPAMRRSLVPQLRSGKFNVLLTTYEYIIKDKHILAKIRWKYMIVDEGHRMKNHHCKLTQVLNTHYVAPRRILLTGTPLQNKLPELWALLNFLLPTIFKSCSTFEQWFNAPFAMTGERVDLNEEETILIIRRLHKVLRPFLLRRLKKEVESQLPEKVEYVIKCDMSALQKILYRHMQAKGILLTDGSEKDKKGKGGAKTLMNTIMQLRKICNHPYMFQHIEESFAEHLGYSNGVINGAELYRASGKFELLDRILPKLRATNHRVLLFCQMTSLMTIMEDYFAFRNFLYLRLDGTTKSEDRAALLKKFNEPGSQYFIFLLSTRAGGLGLNLQAAHTVVIFDSDWNPHQDLQAQDRAHRIGQQNEVRVLRLCTVNSVEEKILAAAKYKLNVDQKVIQAGMFDQKSSSHERRAFLQAILEHEEENEEEDEVPDDETLNQMIARREEEFDLFMRMDMDRRREDARNPKRKPRLMEEDELPSWIIKDDAEVERLTCEEEEEKIFGRGSRQRRDVDYSDALTEKQWLRAIEDGNLEEMEEEVRLKKRKRRRNVDKDPAKEDVEKAKKRRGRPPAEKLSPNPPKLTKQMNAIIDTVINYKDSSGRQLSEVFIQLPSRKELPEYYELIRKPVDFKKIKERIRNHKYRSLGDLEKDVMLLCHNAQTFNLEGSQIYEDSIVLQSVFKSARQKIAKEEESEDESNEEEEEEDEEESESEAKSVKVKIKLNKKDDKGRDKGKGKKRPNRGKAKPVVSDFDSDEEQDEREQSEGSGTDDE

SEQ ID NO: 180 - protein, 543 aa, Homo sapiens
MAAAKAEMQLMSPLQISDPFGSFPHSPTMDNYPKLEEMMLLSNGAPQFLGAAGAPEGSGSNSSSSSSGGGGGGGGGSNSSSSSSTFNPQADTGEQPYEHLTAESFPDISLNNEKVLVETSYPSQTTRLPPITYTGRFSLEPAPNSGNTLWPEPLFSLVSGLVSMTNPPASSSSAPSPAASSASASQSPPLSCAVPSNDSSPIYSAAPTFPTPNTDIFPEPQSQAFPGSAGTALQYPPPAYPAAKGGFQVPMIPDYLFPQQQGDLGLGTPDQKPFQGLESRTQQPSLTPLSTIKAFATQSGSQDLKALNTSYQSQLIKPSRMRKYPNRPSKTPPHERPYACPVESCDRRFSRSDELTRHIRIHTGQKPFQCRICMRNFSRSDHLTTHIRTHTGEKPFACDICGRKFARSDERKRHTKIHLRQKDKKADKSVVASSATSSLSSYPSPVATSYPSPVTTSYPSPATTSYPSPVPTSFSSPGSSTYPSPVHSGFPSPSVATTYSSVPPAFPAQVSSFPSSAVTNSFSASTGLSDMTATFSPRTIEIC

SEQ ID NO: 181 - protein, 335 aa, Homo sapiens
MDNARMNSFLEYPILSSGDSGTCSARAYPSDHRITTFQSCAVSANSCGGDDRFLVGRGVQIGSPHHHHHHHHHHPQPATYQTSGNLGVSYSHSSCGPSYGSQNFSAPYSPYALNQEADVSGGYPQCAPAVYSGNLSSPMVQHHHHHQGYAGGAVGSPQYIHHSYGQEHQSLALATYNNSLSPLHASHQEACRSPASETSSPAQTFDWMKVKRNPPKTGKVGEYGYLGQPNAVRTNFTTKQLTELEKEFHFNKYLTRARRVEIAASLQLNETQVKIWFQNRRMKQKKREKEGLLPISPATPPGNDEKAEESSEKSSSSPCVPSPGSSTSDTLTTSH

SEQ ID NO: 182 - protein, 716 aa, Homo sapiens [sequence omitted]

SEQ ID NO: 183 - protein, 998 aa, Homo sapiens
MTRVNAGRKGSLAALYDLAVLKKKVKEKEEKKKKKIKTIKSEAEDLAEPLSSTEGVAPLSQAPSPLAIPAIKEEPLEDLKPCLGINEISSSFFSLLLEILLLESQASLPMLEERVLDWQSSPASSLNSWFSAAPNWAELVLPALQYLAGESRAVPSSFSPFVEFKEKTQQWKLLGQSQDNEKELAALFQLWLETKDQAFCKQENEDSSDATTPVPRVRTDYVVRPSTGEEKRVFQEQERYRYSQPHKAFTFRMHGFESVVGPVKGVFDKETSLNKAREHSLLRSDRPAYVTILSLVRDAAARLPNGEGTRAEICELLKDSQFLAPDVTSTQVNTVVSGALDRLHYEKDPCVKYDIGRKLWIYLHRDRSEEEFERIHQAQAAAAKARKALQQKPKPPSKVKSSSKESSIKVLSSGPSEQSQMSLSDSSMPPTPVTPVTPTTPALPAIPISPPPVSAVNKSGPSTVSEPAKSSSGVLLVSSPTMPHLGTMLSPASSQTAPSSQAAARVVSHSGSAGLSQVRVVAQPSLPAVPQQSGGPAQTLPQMPAGPQIRVPATATQTKVVPQTVMATVPVKAQTTAATVQRPGPGQTGLTVTSLPATASPVSKPATSSPGTSAPSASTAAVIQNVTGQNIIKQVAITGQLGVKPQTGNSIPLTATNFRIQGKDVLRLPPSSITTDAKGQTVLRITPDMMATLAKSQVTTVKLTQDLFGTGGNTTGKGISATLHVTSNPVHAADSPAKASSASAPSSTPTGTTVVKVTPDLKPTEASSSAFRLMPALGVSVADQKGKSTVASSEAKPAATIRIVQGLGVMPPKAGQTITVATHAKQGASVASGSGTVHTSAVSLPSMNAAVSKTVAVASGAASTPISISTGAPTVRQVPVSTTVVSTSQAGKLPTRITVPLSVISQPMKGKSVVTAPIIKGNLGANLSGLGRNIILTTMPAGTKLIAGNKPVSFLTAQQLQQLQQQGQATQVRIQTVPASISNREQLLAPPKQSPLLL

SEQ ID NO: 184 - protein, 339 aa, Homo sapiens
MDQNNSLPPYAQGLASPQGAMTPGIPIFSPMMPYGTGLTPQPIQNTNSLSILEEQQRQQQQQQQQQQQQQQQQQQQQQQQQQQQQQQQQQQQQQQAVAAAAVQQSTSQQATQGTSGQAPQLFHSQTLTTAPLPGTTPLYPSPMTPMTPITPATPASESSGIVPQLQNIVSTVNLGCKLDLKTIALRARNAEYNPKRFAAVIMRIREPRTTALIFSSGKMVCTGAKSEEQSRLAARKYARVVQKLGFPAKFLDFKIQNMVGSCDVKFPIRLEGLVLTHQQFSSYEPELFPGLIYRMIKPRIVLLIFVSGKVVLTGAKVRAEIYEAFENIYPILKGFRKTT

SEQ ID NO: 185 - protein, 404 aa, Homo sapiens [sequence omitted]

SEQ ID NO: 186 - protein, 119 aa, Homo sapiens
MKALSPVRGCYEAVCCLSERSLAIARGRGKGPAAEEPLSLLDDMNHCYSRLRELVPGVPRGTQLSQVEILQRVIDYILDLQVVLAEPAPGPPDGPHLPIQTAELAPELVISNDKRSFCH

SEQ ID NO: 187 - protein, 394 aa, Homo sapiens
MGCLGNSKTEDQRNEEKAQREANKKIEKQLQKDKQVYRATHRLLLLGAGESGKSTIVKQMRILHVNGFNGEGGEEDPQAARSNSDGEKATKVQDIKNNLKEAIETIVAAMSNLVPPVELANPENQFRVDYILSVMNVPDFDFPPEFYEHAKALWEDEGVRACYERSNEYQLIDCAQYFLDKIDVIKQADYVPSDQDLLRCRVLTSGIFETKFQVDKVNFHMFDVGGQRDERRKWIQCFNDVTAIIFVVASSSYNMVIREDNQTNRLQEALNLFKSIWNNRWLRTISVILFLNKQDLLAEKVLAGKSKIEDYFPEFARYTTPEDATPEPGEDPRVTRAKYFIRDEFLRISTASGDGRHYCYPHFTCAVDTENIRRVFNDCRDIIQRMHLRQYELL

SEQ ID NO: 188 - protein, 341 aa, Homo sapiens
MEQYTANSNSSTEQIVVQAGQIQQQQQGGVTAVQLQTEAQVASASGQQVQTLQVVQGQPLMVQVSGGQLITSTGQPIMVQAVPGGQGQTIMQVPVSGTQGLQQIQLVPPGQIQIQGGQAVQVQGQQGQTQQIIIQQPQTAVTAGQTQTQQQIAVQGQQVAQTAEGQTIVYQPVNADGTILQQGMITIPAASLAGAQIVQTGANTNTTSSGQGTVTVTLPVAGNVVNSGGMVMMVPGAGSVPAIQRIPLPGAEMLEEEPLYVNAKQYHRILKRRQARAKLEAEGKIPKERRKYLHESRHRHAMARKRGEGGRFFSPKEKDSPHMQDPNQADEEAMTQIIRVS

SEQ ID NO: 189 - protein, 502 aa, Homo sapiens [sequence omitted]

SEQ ID NO: 190 - protein, 269 aa, Homo sapiens
MSSYFVNSFSGRYPNGPDYQLLNYGSGSSLSGSYRDPAAMHTGSYGYNYNGMDLSVNRSSASSSHFGAVGESSRAFPAPAQEPRFRQAASSCSLSSPESLPCTNGDSHGAKPSASSPSDQATSASSSANFTEIDEASASSEPEEAASQLSSPSLARAQPEPMATSTAAPEGQTPQIFPWMRKLHISHDMTGPDGKRARTAYTRYQTLELEKEFHFNRYLTRRRRIEIAHALCLSERQIKIWFQNRRMKWKKDNKLKSMSLATAGSAFQP

SEQ ID NO: 191 - protein, 480 aa, Homo sapiens
MEVAPEQPGWMAHPAVLNAHDPDSHHPGLAHNYMEPAHVLPPDEVDVFFNHLDSQGNPYYANPAHARAAVSYSPAHARLTGSQMCRPHLLHSPGLPWLDGGKAALSAAAAHHHNPWTVSPFSKTPLHPSAAGGPGGPLSVYPGAGGGSGGGSGSSVASLTPTAAHSGSHLFGFPPTPPKEVSPDPSTTGAASPASSSAGGSAARGEDKDGVKYQVSLTESMKMESGSPLRPGLATMGTQPATHHPIPTYPSYVPAAAHDYSSGLFHPGGFLGGPASSFTPKQRSKARSCSEGRECVNCGATATPLWRRDGTGHYLCNACGLYHKMNGQNRPLIKPKRRLSAARRAGTCCANCQTTTTTLWRRNANGDPVCNACGLYYKLHNVNRPLTMKKEGIQTRNRKMSNKSKKSKKGAECFEELSKCMQEKSSPFSAAALAGHMAPVGHLPPFSHSGHILPTPTPIHPSSSLSFGHPHPSSMVTAMG

SEQ ID NO: 192 - protein, 777 aa, Homo sapiens
MDEMTAVVKIEKGVGGNNGGNGNGGGAFSQARSSSTGSSSSTGGGGQESQPSHLALLAATCSRIESPNENSNNSQGPSQSGGTGELDLTATQLSQGPMAGRSSLPPLGLPLPQRNRVAAVPMAAMAVSLPRIAQSLVGSMLCAAPNLQNQQVLTGLPGVMPNIQYQVIPQFQTVDGQQLQFAATGAQVQQDGSGQIQIIPGANQQIITNRGSGGNIIAAMPNLLQQAVPLQGLANNVLSGQTQYVTNVPVALNGNITLLPVNSVSAATLTPSSQAVTISSSGSQESGSQPVTSGTTISSASLVSSQASSSSFFTNANSYSTTTTTSNMGIMNFTTSGSSGTNSQGQTPQRVSGLQGSDALNIQQNQTSGGSLQAGQQKEGEQNQQTQQQQILIQPQLVQGGQALQALQAAPLSGQTFTTQAISQETLQNLQLQAVPNSGPIIIRTPTVGPNGQVSWQTLQLQNLQVQNPQAQTITLAPMQGVSLGQTSSSNTTLTPIASAASIPAGTVTVNAAQLSSMPGLQTINLSALGTSGIQVHPIQGLPLAIANAPGDHGAQLGLHGAGGDGIHDDTAGGEEGENSPDAQPQAGRRTRREACTCPYCKDSEGRGSGDPGKKKQHICHIQGCGKVYGKTSHLRAHLRWHTGERPFMCTWSYCGKRFTRSDELQRHKRTHTGEKKFACPECPKRFMRSDHLSKHIKTHQNKKGGPGVALSVGTLPLDSGAGSEGSGTATPSALITTNMVAMEAICPEGIARLANSGINVMQVADLQSINISGNGF

SEQ ID NO: 193 - DNA, 2306 bp, Homo sapiens
agcggggggagtggggaggaggggggtcggccgccgcagccatggaggccaactggaccgcgttcctgttccaggcccatgaagcttcccatcaccaacagcaggcagcacagaacagcttgctgcccctcctgagctctgccgtggagccccctgatcagaaaccattgcttccaataccaataactcagaaacctcagggtgcaccagaaacattaaaggatgccattgggattaaaaaagaaaaacccaaaacttcatttgtgtgcacttactgcagtaaagctttcagggacagctatcacctgaggcgccacgaatcctgccacacagggatcaagttggtgtcccggccaaagaaaacccccaccacggtggttccccttatctctaccatcgctggggacagcagccgaacttcgttggtctcgaccattgcaggcatcttgtcaacagtcactacatcttcctcgggcaccaaccccagtagcagtgccagcaccacagctatgccagtgacccagtctgtcaagaaacccagtaagcctgtcaagaagaaccatgcttgtgagatgtgtgggaaggccttccgagatgtgtaccatctcaatcgacacaagctctcccattcagatgagaaaccctttgagtgtcctatttgtaatcagcgcttcaagaggaaggaccggatgacttaccatgtgaggtctcatgaaggaggcatcaccaaaccctatacttgcagtgtttgtgggaaaggcttctcaaggcctgaccacttaagctgtcatgtaaaacatgtccattcaacagaaagacccttcaaatgccaaacgtgcactgctgcctttgccaccaaagacagactgcggacacacatggtgcgccatgaaggcaaggtatcatgtaacatctgtgggaagctcctgagtgcagcatacatcaccagccacttaaagactcatgggcagagccaaagtatcaactgtaatacatgtaaacaaggcatcagtaaaacatgcatgagtgaagagaccagtaaccaaaagcagcagcagcagcagcagcagcaacaacaacaacaacaacatgtgacaagctggccagggaagcaagtagaaacactcagactgtgggaagaagctgttaaagcaaggaagaaagaagctgctaacctgtgccaaacctccacggctgctacgacacctgtgactctcactactccattcagtataacatcctctgtgtcgtctgagactatgtcaaacccagtcacagtggcagctgcaatgagcatgagaagtccagtaaatgtttcaagtgcagttaacataaccagcccaatgaacatagggcatcctgtaactataaccagtccattatccatgacctctcctttaacactcactaccccagtcaacctccccacccccgtcactgccccagtgaatatagcacaccctgtcaccatcacatctccaatgaatctacccacacctatgacattagccgcccctctcaatatagcaatgagacctgtagagagcatgcctttcttgccccaagctttgcctacatcaccgccttggtaaacagtattataaaatcaaaatatgggtaaaagtaaatatttaccagcaacttaacttttagttgattaaagcaaaaagtaaaccatgaaattgggagattttattacattagttaataagagtgtggtagcatttttctccaatttggctgggattattcaaagtagggtgtgtatgtaacttatcactggaccactttagtttaatcagaaattccttttagctgacaacattgcttaaacaggatagtagttggcaagatgaaatgccagaattaaaaccaatcataagtagaacccacttcaaaataaaaaaacagcattactatttctaatcccaaggaatcactttattgtaaacactagcagaactcttctccctatacaaggtggatggctgattttaacctgaaattttaaatccacagattgagagctagtgtagaattgtctgtgtttattgtttttatgagtaaatacatgcattgtcataataaaatgcatttcagagaatatgcattttacctttgggaatatgttaatttcaggcagcattccctatgggaaaggtgataccagctctgatatgcaaagcatatgataatttatcattctaacttcaacgtataatagggattgtgacctgatatttggagatgtaaatattgctcagcatattaatcccgatggaatatagcattgtagttgacttttt

SEQ ID NO: 194 - DNA, 4153 bp, Homo sapiens
agtcagagtcactttctgtaaatggtacttaggtaggcgcgtccgcctcggttacagcggagctgcccggcgacggccgcatggtgcagctgagtcctcccgcgctggctgcccccgccgcccccggccgcgcgctgctctacagcctcagccagccgctggcctctctcggcagcgggttctttggggagccggatgccttccctatgttcaccaccaacaatcgagtgaagaggagaccttccccctatgagatggagattactgatggtccccacaccaaagttgtgcggcgtatcttcaccaacagccgggagcgatggcggcagcagaatgtgaacggggcctttgccgagctccgcaagctgatccccacacatcccccggacaagaagctcagcaagaatgagatcctccgcctggccatgaagtatatcaacttcttggccaagctgctcaatgaccaggaggaggagggcacccagcgggccaagactggcaaggaccctgtggtgggggctggtgggggtggaggtgggggagggggcggcgcgcccccagatgacctcctgcaagacgtgctttcccccaactccagctgcggcagctccctggatggggcagccagcccggacagctacacggaggagcccgcgcccaagcacacggcccgcagcctccatcctgccatgctgcctgccgccgatggagccggccctcggtgatgggtctgggccaccaggatcagccaggagggcgttcttaggctgctgggatggtgggcttcagggcaggtggggtgagaattgggcggctctgaagcaaggcggtggacttgaactttcctggatgtctgaactttgggaagcctttactgaccctggggctggcttttctgtttcctgtaccagtaggagatcagaaaaatggagcaaagtggtaggtactttttgtgaagacggcacggtcttccctcttccctcagtcccaaatccttcccaagtaagaggctggagttgtcactgcttttggcctggagtttgggatccctgtctttcctaagacctggggttgtcagctctcatctgaggcatccagcagtctctgccttgcctttagcccctcccaagctggctggggtggcctgtgtggccacttctgtccatatttataggtacccaatagctgcccatttcgtgagccccatcttcacccaggcctatgttgatccatccagcttgccagatgctgcagagtcacaagcctcgaggtgccttcttcagggcctggttgaagaagatgatcagtggacagtctgctctagatgagctgggccggagggtcaggaaacccagtcgcccttacttcttgccctggggatcaaagttctgctttctccccaatgagacttgccttcctaagcctgtggctgtggagaccatgtctgcagccctgagaaagccctgtcgggctttgtgtgaaggcagagaaagggacaatgatagtagagtgatatggagcaagagatattttgggcatgtgggcttcaactcctcgacatcactgttcatgctggcgagtgaatgccagtgtgctgatgggcgtacgctggtgctgagtagatgcgcagccccatctgtgcattctcctggatgcttagagggatttctttgctgtaagatgtctgtttgctgatggtctggtctatgttccgaattgagcacaaaacctgtcctatgaatgctttgcatttggaatttttgcttgacttcagttattggtggaatctttagcgctcaataggaccaggatccagcctcacttctagggtatgggaaatccaatcagagaccaggccctggctaagacccaaacatatgcacattcacttagcagaaccttaaacacccctcagttgtgcagcttttggtcatcaagggtgcgtctgggaggttggtttaatgcaatagaagtgctcccctctgaaagttgtacatgaaatttttgtaaatcacatccttatccttcatcttttaaagaaataaccactgcaagtccttttgtaaagtgaagaatccttttgtagaatgaaccactgccccttcattgatttcctgtgtcaatccagatggtgggatgtggttttcttaaggtgaggcctgtctgtgacctgcatctaagcccatgggacaaattgcacagaagtcctgtatgtctgtcattgtacccttaagtcaccctagccctctccctctaggctctgccttcgaggtcagaggagagatagcctgtggccctgtcctgccatgcaagaactcatcactgtggctgtctggaaagcccccccttatagtttgggcttcagcctagtggcttgtcctcaccatgatggggccctaattcagccatgtacagacagagaatatgtctgctcctttccccttccttttaagtaaggtccaattctcgagcttggggcaacattgttcacctttgtagcactcaggctctccattcaatttcaggctccccagatcatgttttggtgaaaattagggttggttcctttccaacgtttggaagatcctgtgaggagccccatctgtctaaagatagagtcattgctgtaggatctaaggctgtttgcttcaccgtggattcgcttgagttaggaatgagaagtagccacagtatggatgggtggatgggttttatgagatggatcacatattttattaagaactcaaacttctggctccctcttctttcagacttgccatgtgactctggcttggcctatctcctagggctatggtgtggactgaatgggatcatgaaagtagacagttttgagaacgtaaagaactttttcttttccctcaatctcaatcctgcagtggggtttcgcagcctgagtccacgacctaggcagtaggccggtgtgcctgactgcccagcatttgggtaatttagattgtaaaccgctttggcctgagttattgagattgtcctcatttctccagattatctatttgtgtgtgtgtgtgtgtgtgtgtgagagacggtgtcttgttctgtcactcaggctggagtacagtggtgccatcattgctgtctgcagccttgaactctgggctcaagcaatcctctcacctcagcctcccgagtagggaggaccacaggtgtgagccaccacacctggctaatttttacttttttttttttttggtagagatggagtcttgctatattgcccaggctggtcttgaagtcctggcttcaggcaattctcctgcctttgcctccagaagcactgggatcacaggtgtcagccattgcacccagcccagattgtcttaatttctatcttgttccaaggccagggacagtaataagaatggaaaagagatatgggaacactggcagactgtgtaaaatgtaatgcaactacccaaaacaagcctggtaggaaagggcaagtctttaggtctttgtaagaactaaagaagatctgtaatttttattttcaccctctgtaccccatgaccttatccttcctctccttccttgttacccatgaaaaactggcaacattccaagaatagcatctgtacaaaggggaaagaacataaaggtaaaacaaaacaaaacaacattttgagaacaaagatgaccataaccactgaagggaatcacatcttttaagacaaattcatattcttttatttgttatggcagatgacaagatggtacaacctttattcttttccaaaataaaacaaagggcacagcatctgtagtcagccgacaactctttcggccttttgggggtgggtctggccgtacttgtgatttcgatggtacgtgaccctctgctgaagacttgccccctgcccgtgtacatagtgcattgtttctgtgggcgggcccagcactttccgtcaacgttgtactgtatgtgatgaattgcgttggtctctgcatttttctgcagaagaggagtaaccgctccaggtaccttgacctttgtacagcccagaggccaacactgtgggtgtgtgactctttagcaaaaaaaacccatgtggtgatgatgtgtctatatatgtgaggatgtatcgggaagatttctaaataaaagttttacaaaggg

SEQ ID NO: 195 - DNA, 1931 bp, Homo sapiens
ccaggccctgctccatggagccttcagtctcctgggaagctgtgcctgtctggctctggcactgaccacatcctctcggccatttctgaagtgcactcctcccagcccagctccagaatggccctgccccccagccccctggccatggaatatgtcaatgactttgacttgatgaagtttgaggtaaagcgggaaccctctgagggccgacctggcccccctacagcctcactgggctccacaccttacagctcagtgcctccttcacccaccttcagtgaaccaggcatggtgggggcaaccgagggcacccggccaggcctggaggagctgtactggctggctaccctgcagcagcagctgggggctggggaggcattggggctgagtcctgaagaggccatggagctgctgcagggtcagggcccagtccctgttgatgggccccatggctactacccagggagcccagaggagacaggagcccagcacgtccagctggcagagcggttttccgacgcggcgctggtctcgatgtctgtgcgggagctaaaccggcagctgcggggctgcgggcgcgacgaggcgctgcggctgaagcagaggcgccgcacgctgaagaaccgcggctacgcgcaggcctgtcgctccaagcggctgcagcagcggcgcgggctggaggccgagcgcgcccgcctggccgcccagctggacgcgctgcgggccgaggtggcccgcctggcccgggagcgcgatctctacaaggctcgctgtgaccggctaacctcgagcggccccgggtccggggacccctcccacctcttcctctgagccgttcagagcaccttgtggtgtagtgggggctgggtggggtggctccgcccaggaggcggctgcacggttctctgcatcgttaccagagcgccttctggtcctagccacgccctgtatgaccgcgcaaatatccccaaagcttttgggtcctcaagtcatgcccgaatttagatgctggtcattttctggagaggggtcccctccccttacgaacacaaaaacccagcccacatgactagcacgctgagctctgcagggaccagtgccaggcactggggggtggaagtgtggtgacacagtgaatgggaggtggaggagggttgcagctcccacctcagtttagtttttaattcagggttttcaacctgtaacacattaaagctgtaattagcaatgaggctgtattttcattctgaagcttgtaacctccccattttagcactacagaattttcaagatttcaatatccaacaactagatagattaggacctctatccgagatgctttttccctgcccaaccctgtggccttcagggctcagagcagcaaaggcctgaagagtgagctctgggggttgttggtgtgggttgggagagagctgtgtgcagaagtctggaaacctgggtcctagtcccagctcttccatgggatccccctgtcaccctgagcaaatcagttgcttcctggacttgtgttacttcatctaattctcatgtggattggacgacttctgctccctttccagttctggcatctccccagtatggaagtcccggtggtctccccaagaagtccccaagacaatctcgccaaaggcacctcctatcctcctgcagtttcccagctgcagcctaggcaggggatgcacagcccaggcgaggaagcctggcttctctgtgagcacatacgtgggtcctcggcagctccctccaggctgtctgggcctccagacctgcacagggtgctcctgccacctcccacctctctgagggctgaggtgagacttctcctgggatgacaatttgctgagagagtgcagcttttgtgaattaaacttgaagtccaggcagaattctaatgcaataagctaaatgtt

SEQ ID NO: 196 - DNA, 1893 bp, Homo sapiens
agttagttacttcctgtctagagttgtagcttccacctgcaccttctagccaccatggcaacctcatctgaagaagttttgctgattgtaaagaaagtgcgtcaaaagaagcaggatggagctctgtacctcatggcagaaagaattgcttgggcacctgaaggcaaagatagatttacaatcagccatatgtatgcagatattaaatgccagaaaattagtccagaaggaaaagctaaaattcagcttcagctggtcctacatgcaggggacacaactaacttccatttttccaatgaaagcacagcagtgaaagagcgagatgcagtaaaagaccttcttcagcagctgctgcccaaattcaagaggaaagcaaataaagaactggaagagaagaacagaatgctgcaagaagatcctgttttgtttcagctttataaagaccttgttgtgagtcaagtgatcagtgctgaggaattctgggccaatcgtttaaatgtgaatgcaacagatagttcttccacatccaatcataagcaggatgttggcatttctgctgcatttctggctgatgtccggccccaaactgatggctgtaacggtctaagatataatttaacttctgatatcattgagtccatatttaggacctatccagcagtaaaaatgaaatatgcagaaaatgttccccacaacatgacagagaaggaattctggacacgttttttccagtcccattattttcacagggatcggctgaatacagggtcaaaggatctctttgcagaatgtgccaaaatagatgaaaaaggcctaaaaacaatggtttcattaggagtgaaaaacccactactagatttaacagctttggaagataaaccattagatgagggctatggcatttcctctgtgccatctgcttccaattctaaatccataaaagagaatagtaatgctgccatcatcaagagatttaaccatcacagtgccatggtcctggcagctggactcagaaaacaagaagcacaaaatgaacaaactagtgagcccagcaacatggatggaaattccggagatgcagactgctttcagccagcagtcaaaagggcgaaattacaagagtccattgaatatgaagacttggggaaaaataattctgtaaaaacgattgcactaaacctcaagaagtcagataggtattatcatggtccaactccaatccagtcactacagtatgcaacaagtcaggacattattaattcttttcaaagtattagacaagaaatggaagcttatacacccaagttaactcaggttctctcaagtagtgctgccagtagtaccatcacagcactgtcacctggaggggcacttatgcagggaggaacacagcaagccataaaccagatggtgccaaatgatattcaatctgaattgaaacacttatatgtagctgttggagaacttctacgacatttctggtcctgctttcctgttaatacgccattcctagaagaaaaggtagtgaaaatgaaaagtaatttggaacgattccaagttacgaagctctgtccattccaagaaaagattcggagacagtatttaagcacaaatttggtaagtcacatagaagagatgctccagacagcctacaacaagctccacacatggcagtcacggcgtctgatgaagaaaacgtgaggtggccatgatgcttacaggttttgtgagattgagagaactatgacctgcagcaactctggaaacctggcctgacagacaagcagatgacctcacaggagtgataagaaacatctgctccacgccaactcccagagctgatgctattgtacttgcacattggagactgaaaggaaagaagggactaaatgc

SEQ ID NO: 197 - DNA, 3824 bp, Homo sapiens
gcggggctagagctgtcggagaagcgggaccgcgaggccggcgcgcggcgctctgcgcggtcagagggagcgcctggcagcagcaggagcagcagcagcagcccgcggcggggccgccgccagccgccgcgaccgccgcggctgcagcctccgaagggaggccgggtgagccggcgtacgcactttcccgcggactttcggagtgtttgtggatatacatgccaagccgccacgatgatgtccatgaacagcaagcagcctcactttgccatgcatcccaccctccctgagcacaagtacccgtcgctgcactccagctccgaggccatccggcgggcctgcctgcccacgccgccgctgcagagcaacctcttcgccagcctggacgagacgctgctggcgcgggccgaggcgctggcggccgtggacatcgccgtgtcccagggcaagagccatcctttcaagccggacgccacgtaccacacgatgaacagcgtgccgtgcacgtccacttccacggtgcctctggcgcaccaccaccaccaccaccaccaccaccaggcgctcgaacccggcgatctgctggaccacatctcctcgccgtcgctcgcgctcatggccggcgcgggcggcgcgggcgcggcggccggcggcggcggcgcccacgacggcccggggggcggtggcggcccgggcggcggcggcggcccgggcggcggcggccccgggggaggcggcggtggcggcccggggggcggcggcggcggcccgggcggcgggctcctgggcggctccgcgcaccctcacccgcatatgcacagcctgggccacctgtcgcaccccgcggcggcggccgccatgaacatgccgtccgggctgccgcaccccgggctggtggcggcggcggcgcaccacggcgcggcagcggcagcggcggcggcgtcggccgggcaggtggcagcggcatcggcggcggcggccgtggtgggcgcagcgggcctggcgtccatctgcgactcggacacggacccgcgcgagctcgaggcgttcgcggagcgcttcaagcagcggcgcatcaagctgggcgtgacgcaggccgacgtgggctcggcgctggccaacctcaagatcccgggcgtgggctcactcagccagagcaccatctgcaggttcgagtcgctcacgctctcgcacaacaacatgatcgcgctcaagcccatcctgcaggcgtggctcgaggaggccgagggcgcccagcgcgagaaaatgaacaagcctgagctcttcaacggcggcgagaagaagcgcaagcggacttccatcgccgcgcccgagaagcgctccctcgaggcctacttcgccgtgcagccccggccctcgtccgagaagatcgccgccatcgccgagaaactggacctcaaaaagaacgtggtgcgggtgtggttttgcaaccagagacagaagcagaagcggatgaaattctctgccacttactgagggggctgggaggtgtcgggcgggacagaatggggagctgaggaggcatttttggggggctttcctctgcttgcctcccctcggatttggagtgtccgttatcctgcctgcatttggggagtcccttctcgctctctttcctccacccattctctgattttcctgcctttgctgtcccctagccttgaggactggggtgctgggtgtggggattggagtatagggtaggggagaagggggggagcattcgggggagtggggagtggggggaaggaaagcggagacccgagcaggggttttaaggagcaggatggttctggggtttgggtggggggagacgcgggaagggtaggaaaatggactgtttctgaccagagacacttacctaaatatcctggggaccaaggaactatgtacaaaaacaaacctaccaaccaccaaaaactagacaaataaagacaaactaaaacaaaacagaacaaaagcaaaggaaaatgctttagaaattttaactccggggagccataatctgcaacttcattttcccccatagaagagaaaaaagagcaccaccattattaccacctccccaaccctacacgcacgaactgagtcgaaaaacgaaaaccaaacgagcgagaagttgaagttctgggtatcaaagctagttgttctgtctgcgtgtttaatttttccctctctcacctccaccccatccatatcctctttatttcctccgttccaatgagaggcctatggctgctctccaatcccgggaagtgagtgggagcacagctgaaaagagagggtcagggggaggctggctgcttgcttaggtggaatccaacttttcccgtggccctgcctatactctggtggcctggtcctgttggggtgggggtctttggagagaagggcatagtctttgagctactaaaaagcagaattccggagcttcgagatatcttattctaggaaaatgaaacaattttaacaacagttttttttcctcttatgtcgaagatctagttttagacaatttcaaaataagcttttcccactcatagaactttaacttgccctttcagttttatcttttttttagagagaggtttaaactactgatttttcctgttgattcaaatagactaatggggtgaaagttattaggagagatactctctcctgttttctccactgaacgagactcatcttgctcttctaggtcccgtttcttcctctcttggaggacatgaaattatagaaatgttgagaagttcctgctttcttttgcggtaggacttggctgtgagaaaatcacctaaatcccagaaaagaggaagacagatttaaagtgcccccacccccatttgtttcaaagaggtctgcatgttgggcgaaaacagaacaactgtgtttccttttacttgttcttattattcaagagtcatttattacaggggataaatgttgggtagcaagaactttaatttgcactaccagtctcccaaatagaaaatcatgtatagtatttcatagtaataatcaggtaccttacaagctgctggtggattttaaaaaattaagatagttgaaggtggttaggtaaaatgcctgctttgtgtacaagatactctttggatctctcgtagagatggtttgttaccatcctttaatcataactaaaacattgaaaacagaacaaatgagaaaagaaaaaaaacctgccgattaacaagactgaaatcatgcatgatctgaaaggtgtggaaagaaacacaattaggtctcactctggttaggcattatttatttaattatgttgtatatcattgtttgcagggcaaacattctatgcatttgaaactgagcactaaactgggctagctttctggtagaccgttttgtggctagtgcgatttcacagtctactgcctgtttccactgaaaacatttttgtcatattcttgtattcaaagaaaacaggaaaaaagttattgtaaatattttatttaatgcacacattcacacagtggtaacagactgccagtgttcatcctgaaatgtctcacggattgatctacctgtctatgtatgtctgctgagctttctccttggttatgttttttctcttttacctttctcctcccttacttctatcagaaccaattctatgcgccaaatacaacagggggatgtgtcccagtacacttacaaaataaaacataactgaaagaagagcagttttatgatttgggtgcgtttttgtgtttatactgggccaggtcctggtagaacctttcaacaaacaaccaaacaaaaaaaaa

SEQ ID NO: 198 - DNA, 4396 bp, Homo sapiens
gcctgaggtgcccgccctggccccaggagaatgaaccagccgcagaggatggcgcctgtgggcacagacaaggagctcagtgacctcctggacttcagcatgatgttcccgctgcctgtcaccaacgggaagggccggcccgcctccctggccggggcgcagttcggaggttcaggtcttgaggaccggcccagctcaggctcctggggcagcggcgaccagagcagctcctcctttgaccccagccggaccttcagcgagggcacccacttcactgagtcgcacagcagcctctcttcatccacattcctgggaccgggactcggaggcaagagcggtgagcggggcgcctatgcctccttcgggagagacgcaggcgtgggcggcctgactcaggctggcttcctgtcaggcgagctggccctcaacagccccgggcccctgtccccttcgggcatgaaggggacctcccagtactacccctcctactccggcagctcccggcggagagcggcagacggcagcctagacacgcagcccaagaaggtccggaaggtcccgccgggtcttccatcctcggtgtacccacccagctcaggtgaggactacggcagggatgccaccgcctacccgtccgccaagacccccagcagcacctatcccgcccccttctacgtggcagatggcagcctgcacccctcagccgagctctggagtcccccgggccaggcgggcttcgggcccatgctgggtgggggctcatccccgctgcccctcccgcccggtagcggcccggtgggcagcagtggaagcagcagcacgtttggtggcctgcaccagcacgagcgtatgggctaccagctgcatggagcagaggtgaacggtgggctcccatctgcatcctccttctcctcagcccccggagccacgtacggcggcgtctccagccacacgccgcctgtcagcggggccgacagcctcctgggctcccgagggaccacagctggcagctccggggatgccctcggcaaagcactggcctcgatctactccccggatcactcaagcaataacttctcgtccagcccttctacccccgtgggctccccccagggcctggcaggaacgtcacagtggcctcgagcaggagcccccggtgccttatcgcccagctacgacgggggtctccacggcctgcagagtaagatagaagaccacctggacgaggccatccacgtgctccgcagccacgccgtgggcacagccggcgacatgcacacgctgctgcctggccacggggcgctggcctcaggtttcaccggccccatgtcgctgggtgggcggcacgcaggcctggttggaggcagccaccccgaggacggcctcgcaggcagcaccagcctcatgcacaaccacgcggccctccccagccagccaggcaccctccctgacctgtctcggcctcccgactcctacagtgggctagggcgagcaggtgccacggcggccgccagcgagatcaagcgggaggagaaggaggacgaggagaacacgtcagcggctgaccactcggaggaggagaagaaggagctgaaggccccccgggcccggaccagcccagacgaggacgaggacgaccttctccccccagagcagaaggccgagcgggagaaggagcgccgggtggccaataacgcccgggagcggctgcgggtccgtgacatcaacgaggcctttaaggagctggggcgcatgtgccaactgcacctcaacagcgagaagccccagaccaaactgctcatcctgcaccaggctgtctcggtcatcctgaacttggagcagcaagtgcgagagcggaacctgaatcccaaagcagcctgtttgaaacggcgagaagaggaaaaggtgtcaggtgtggttggagacccccagatggtgctttcagctccccacccaggcctgagcgaagcccacaaccccgccgggcacatgtgaaaggtatgcctccgtgggacgagccacccgctttcagccctgtgctctggccccagaagccggactcgagaccccgggcttcatccacatccacacctcacacacctgttgtcagcatcgagccaacaccaacctgacaaggttcggagtgatgggggcggccaaggtgacactgggtccaggagctccctggggccctggcctaccactcactggcctcgctccccctgtccccgaatctcagccaccgtgtcactctgtgacctgtcccatggatcctgaaactgcatcttggccctgttgcctgggctgacaggagcattttttttttttccagtaaacaaaacctgaaagcaagcaacaaaacatacactttgtcagagaagaaaaaaatgccttaactataaaaagcggagaaatggaaacatatcactcaagggggatgctgtggaaacctggcttattcttctaaagccaccagcaaattgtgcctaagcgaaatattttttttaaggaaaataaaaacattagttacaagattttttttttcttaaggtagatgaaaattagcaaggatgctgcctttggtctctggtttttttaagctttttttgcatatgttttgtaagcaacaaatttttttgtataaaagtcccgtgtctctcgctatttctgctgctgttcctagactgagcattgcatttcttgatcaaccagatgattaaacgttgtattaaaaagaccccgtgtaaacctgagccccccccgtccccccccccggaagccactgcacacagacagacggggacaggcggcgggtcttttgtttttttgatgttgggggttctcttggttttgtcatgtggaaagtgatgcgtgggcgttccctgatgaaggcaccttggggcttccctgccgcatcctctcccctcaggaaggggactgacctgggcttgggggaagggacgtcagcaaggtggctctgaccctcccaggtgactctgccaagcagctgtggccccagcggtaccctacacaacgccctccccaggcccccctaagctgctctcccttggaacctgcacagctctctgaaatggggcattttgttgggaccagtgacccctggcatggggaccacaccctggagcccggtgctggggacctcctggacaccctgtccttcactccttgccccagggacccaggctcatgctctgaactctggctgagaggagtctgctcaggagccagcacaggacaccccccaccccaccccaccatgtccccattacaccagagggccatcgtgacgtagacaggatgccaggggcctgaccagcctccccaatgctggggagcatccctggcctggggccacacctgctgccctccctctgtgtggtccaagggcaagagtggctggagccgggggactgtgctggtctgagccccacgaaggccttgggctgtggctccgaccctgctgcagaaccagcagggtgtcccctcgggcccatctgtgtcccatgtcccagcacccaggcctctctccaggtctccttttctggtcttttgccatgagggtaaccagctcttcccagctggctgggactgtcttgggtttaaaactgcaagtctcctaccctgggatcccatccagttccacacgaactagggcagtggtcactgtggcacccaggtgtgggcctggctagctgggggccttcatgtgcccttcatgcccctccctgcattgaggccttgtggacccctgggctggctgtgttcatccccgctgcaggtcgggcgtctccccccgtgccactcctgagactccaccgttacccccaggagatcctggactgcctgactcccctccccagactggcttgggagcctgggccccatggtagatgcaagggaaacctcaaggccagctcaatgcctggtatctgcccccagtccaggccaggcggaggggaggggctgtccggctgcctctcccttctcggtggcttcccctgcgccctgggagtttgatctcttaagggaacttgcctctccctcttgttttgctcctgccctgcccctaggtctgggtggcagtggccccatagcctctggaactgtgcgttctgcatagaattcaaacgagattcacccagcgcgaggaggaagaaacagcagttcctgggaaccacaattatggggggtggggggtgtgatctgagtgcctcaagatggttttcaaaaaattttttttaaagaaaataattgtatacgtgtcaacacagctggctggatgattgggactttaaaacgaccctctttcaggtggattcagagacctgtcctgtatataacagcactgtagcaataaacgtgacattttataaag

SEQ ID NO: 199 - protein, 489 aa, Homo sapiens
MALLFLLPLVMQGVSRAEMGTADLGPSSVPTPTNVTIESYNMNPIVYWEYQIMPQVPVFTVEVKNYGVKNSEWIDACINISHHYCNISDHVGDPSNSLWVRVKARVGQKESAYAKSEEFAVCRDGKIGPPKLDIRKEEKQIMIDIFHPSVFVNGDEQEVDYDPETTCYIRVYNVYVRMNGSEIQYKILTQKEDDCDEIQCQLAIPVSSLNSQYCVSAEGVLHVWGVTTEKSKEVCITIFNSSIKGSLWIPVVAALLLFLVLSLVFICFYIKKINPLKEKSIILPKSLISVVRSATLETKPESKYVSLITSYQPFSLEKEVVCEEPLSPATVPGMHTEDNPGKVEHTEELSSITEVVTTEENIPDVVPGSHLTPIERESSSPLSSNQSEPGSIALNSYHSRNCSESDHSRNGFDTDSSCLESHSSLSDSEFPPNNKGEIKTEGQELITVIKAPTSFGYDKPHVLVDLLVDDSGKESLIGYRPTEDSKEFS

SEQ ID NO: 200 - protein, 569 aa, Homo sapiens
MKVLLRLICFIALLISSLEADKCKEREEKIILVSSANEIDVRPCPLNPNEHKGTITWYKDDSKTPVSTEQASRIHQHKEKLWFVPAKVEDSGHYYCVVRNSSYCLRIKISAKFVENEPNLCYNAQAIFKQKLPVAGDGGLVCPYMEFFKNENNELPKLQWYKDCKPLLLDNIHFSGVKDRLIVMNVAEKHRGNYTCHASYTYLGKQYPITRVIEFITLEENKPTRPVIVSPANETMEVDLGSQIQLICNVTGQLSDIAYWKWNGSVIDEDDPVLGEDYYSVENPANKRRSTLITVLNISEIESRFYKHPFTCFAKNTHGIDAAYIQLIYPVTNFQKHMIGICVTLTVIIVCSVFIYKIFKIDIVLWYRDSCYDFLPIKASDGKTYDAYILYPKTVGEGSTSDCDIFVFKVLPEVLEKQCGYKLFIYGRDDYVGEDIVEVINENVKKSRRLIIILVRETSGFSWLGGSSEEQIAMYNALVQDGIKVVLLELEKIQDYEKMPESIKFIKQKHGAIRWSGDFTQGPQSAKTRFWKNVRYHMPVQRRSPSSKHQLLSPATKEKLQREAHVPLG

SEQ ID NO: 201 - protein, 916 aa, Homo sapiens [sequence omitted]

SEQ ID NO: 202 - protein, 1257 aa, Homo sapiens
MVVALRYVWPLLLCSPCLLIQIPEEYEGHHVMEPPVITEQSPRRLVVFPTDDISLKCEASGKPEVQFRWTRDGVHFKPKEELGVTVYQSPHSGSFTITGNNSNFAQRFQGIYRCFASNKLGTAMSHEIRLMAEGAPKWPKETVKPVEVEEGESVVLPCNPPPSAEPLRIYWMNSKILHIKQDERVTMGQNGNLYFANVLTSDNHSDYICHAHFPGTRTIIQKEPIDLRVKATNSMIDRKPRLLFPTNSSSHLVALQGQPLVLECIAEGFPTPTIKWLRPSGPMPADRVTYQNHNKTLQLLKVGEEDDGEYRCLAENSLGSARHAYYVTVEAAPYWLHKPQSHLYGPGETARLDCQVQGRPQPEVTWRINGIPVEELAKDQKYRIQRGALILSNVQPSDTMVTQCEARNRHGLLLANAYIYVVQLPAKILTADNQTYMAVQGSTAYLLCKAFGAPVPSVQWLDEDGTTVLQDERFFPYANGTLGIRDLQANDTGRYFCLAANDQNNVTIMANLKVKDATQITQGPRSTIEKKGSRVTFTCQASFDPSLQPSITWRGDGRDLQELGDSDKYFIEDGRLVIHSLDYSDQGNYSCVASTELDVVESRAQLLVVGSPGPVPRLVLSDLHLLTQSQVRVSWSPAEDHNAPIEKYDIEFEDKEMAPEKWYSLGKVPGNQTSTTLKLSPYVHYTFRVTAINKYGPGEPSPVSETVVTPEAAPEKNPVDVKGEGNETTNMVITWKPLRWMDWNAPQVQYRVQWRPQGTRGPWQEQIVSDPFLVVSNTSTFVPYEIKVQAVNSQGKGPEPQVTIGYSGEDYPQAIPELEGIEILNSSAVLVKWRPVDLAQVKGHLRGYNVTYWREGSQRKHSKRHIHKDHVVVPANTTSVILSGLRPYSSYHLEVQAFNGRGSGPASEFTFSTPEGVPGHPEALHLECQSNTSLLLRWQPPLSHNGVLTGYVLSYHPLDEGGKGQLSFNLRDPELRTHNLTDLSPHLRYRFQLQATTKEGPGEAIVREGGTMALSGISDFGNISATAGENYSVVSWVPKEGQCNFRFHILFKALGEEKGGASLSPQYVSYNQSSYTQWDLQPDTDYEIHLFKERMFRHQMAVKTNGTGRVRLPPAGFATEGWFIGFVSAIILLLLVLLILCFIKRSKGGKYSVKDKEDTQVDSEARPMKDETFGEYRSLESDNEEKAFGSSQPSLNGDIKPLGSDDSLADYGGSVDVQFNEDGSFIGQYSGKKEKEAAGGNDSSGATSPINPAVALE

SEQ ID NO: 203 - protein, 1051 aa, Homo sapiens
MGPGPSRAPRAPRLMLCALALMVAAGGCVVSAFNLDTRFLVVKEAGNPGSLFGYSVALHRQTERQQRYLLLAGAPRELAVPDGYTNRTGAVYLCPLTAHKDDCERMNITVKNDPGHHIIEDMWLGVTVASQGPAGRVLVCAHRYTQVLWSGSEDQRRMVGKCYVRGNDLELDSSDDWQTYHNEMCNSNTDYLETGMCQLGTSGGFTQNTVYFGAPGAYNWKGNSYMIQRKEWDLSEYSYKDPEDQGNLYIGYTMQVGSFILHPKNITIVTGAPRHRHMGAVFLLSQEAGGDLRRRQVLEGSQVGAYFGSAIALADLNNDGWQDLLVGAPYYFERKEEVGGAIYVFMNQAGTSFPAHPSLLLHGPSGSAFGLSVASIGDINQDGFQDIAVGAPFEGLGKVYIYHSSSKGLLRQPQQVIHGEKLGLPGLATFGYSLSGQMDVDENFYPDLLVGSLSDHIVLLRARPVINIVHKTLVPRPAVLDPALCTATSCVQVELCFAYNQSAGNPNYRRNITLAYTLEADRDRRPPRLRFAGSESAVFHGFFSMPEMRCQKLELLLMDNLRDKLRPIIISMNYSLPLRMPDRPRLGLRSLDAYPILNQAQALENHTEVQFQKECGPDNKCESNLQMRAAFVSEQQQKLSRLQYSRDVRKLLLSINVTNTRTSERSGEDAHEALLTLVVPPALLLSSVRPPGACQANETIFCELGNPFKRNQRMELLIAFEVIGVTLHTRDLQVQLQLSTSSHQDNLWPMILTLLVDYTLQTSLSMVNHRLQSFFGGTVMGESGMKTVEDVGSPLKYEFQVGPMGEGLVGLGTLVLGLEWPYEVSNGKWLLYPTEITVHGNGSWPCRPPGDLINPLNLTLSDPGDRPSSPQRRRRQLDPGGGQGPPPVTLAAAKKAKSETVLTCATGRAHCVWLECPIPDAPVVTNVTVKARVWNSTFIEDYRDFDRVRVNGWATLFLRTSIPTINMENKTTWFSVDIDSELVEELPAEIELWLVLVAVGAGLLLLGLIILLLWKCGFFKRARTRALYEAKRQKAEMKSQPSETERLTDDY

SEQ ID NO: 204 - protein, 1163 aa, Homo sapiens
MTRTRAALLLFTALATSLGFNLDTEELTAFRVDSAGFGDSVVQYANSWVVVGAPQKITAANQTGGLYQCGYSTGACEPIGLQVPPEAVNMSLGLSLASTTSPSQLLACGPTVHHECGRNMYLTGLCFLLGPTQLTQRLPVSRQECPRQEQDIVFLIDGSGSISSRNFATMMNFVRAVISQFQRPSTQFSLMQFSNKFQTHFTFEEFRRTSNPLSLLASVHQLQGFTYTATAIQNVVHRLFHASYGARRDATKILIVITDGKKEGDSLDYKDVIPMADAAGIIRYAIGVGLAFQNRNSWKELNDIASKPSQEHIFKVEDFDALKDIQNQLKEKIFAIEGTETTSSSSFELEMAQEGFSAVFTPDGPVLGAVGSFTWSGGAFLYPPNMSPTFINMSQENVDMRDSYLGYSTELALWKGVQSLVLGAPRYQHTGKAVIFTQVSRQWRMKAEVTGTQIGSYFGASLCSVDVDTDGSTDLVLIGAPHYYEQTRGGQVSVCPLPRGWRRWWCDAVLYGEQGHPWGRFGAALTVLGDVNGDKLTDVVIGAPGEEENRGAVYLFHGVLGPSISPSHSQRIAGSQLSSRLQYFGQALSGGQDLTQDGLVDLAVGARGQVLLLRTRPVLWVGVSMQFIPAEIPRSAFECREQVVSEQTLVQSNICLYIDKRSKNLLGSRDLQSSVTLDLALDPGRLSPRATFQETKNRSLSRVRVLGLKAHCENFNLLLPSCVEDSVTPITLRLNFTLVGKPLLAFRNLRPMLAALAQRYFTASLPFEKNCGADHICQDNLGISFSFPGLKSLLVGSNLELNAEVMVWNDGEDSYGTTITFSHPAGLSYRYVAEGQKQGQLRSLHLTCDSAPVGSQGTWSTSCRINHLIFRGGAQITFLATFDVSPKAVLGDRLLLTANVSSENNTPRTSKTTFQLELPVKYAVYTVVSSHEQFTKYLNFSESEEKESHVAMHRYQVNNLGQRDLPVSINFWVPVELNQEAVWMDVEVSHPQNPSLRCSSEKIAPPASDFLAHIQKNPVLDCSIAGCLRFRCDVPSFSVQEELDFTLKGNLSFGWVRQILQKKVSVVSVAEITFDTSVYSQLPGQEAFMRAQTTTVLEKYKVHNPTPLIVGSSIGGLLLLALITAVLYKVGFFKRQYKEMMEEANGQIAPENGTQTPSPPSEK

SEQ ID NO: 205 - protein, 1752 aa, Homo sapiens
MAGPRPSPWARLLLAALISVSLSGTLANRCKKAPVKSCTECVRVDKDCAYCTDEMFRDRRCNTQAELLAAGCQRESIVVMESSFQITEETQIDTTLRRSQMSPQGLRVRLRPGEERHFELEVFEPLESPVDLYILMDFSNSMSDDLDNLKKMGQNLARVLSQLTSDYTIGFGKFVDKVSVPQTDMRPEKLKEPWPNSDPPFSFKNVISLTEDVDEFRNKLQGERISGNLDAPEGGFDAILQTAVCTRDIGWRPDSTHLLVFSTESAFHYEADGANVLAGIMSRNDERCHLDTTGTYTQYRTQDYPSVPTLVRLLAKHNIIPIFAVTNYSYSYYEKLHTYFPVSSLGVLQEDSSNIVELLEEAFNRIRSNLDIRALDSPRGLRTEVTSKMFQKTRTGSFHIRRGEVGIYQVQLRALEHVDGTHVCQLPEDQKGNIHLKPSFSDGLKMDAGIICDVCTCELQKEVRSARCSFNGDFVCGQCVCSEGWSGQTCNCSTGSLSDIQPCLREGEDKPCSGRGECQCGHCVCYGEGRYEGQFCEYDNFQCPRTSGFLCNDRGRCSMGQCVCEPGWTGPSCDCPLSNATCIDSNGGICNGRGHCECGRCHCHQQSLYTDTICEINYSAIHPGLCEDLRSCVQCQAWGTGEKKGRTCEECNFKVKMVDELKRAEEVVVRCSFRDEDDDCTYSYTMEGDGAPGPNSTVLVHKKKDCPPGSFWWLIPLLLLLLPLLALLLLLCWKYCACCKACLALLPCCNRGHMVGFKEDHYMLRENLMASDHLDTPMLRSGNLKGRDVVRWKVTNNMQRPGFATHAASINPTELVPYGLSLRLARLCTENLLKPDTRECAQLRQEVEENLNEVYRQISGVHKLQQTKFRQQPNAGKKQDHTIVDTVLMAPRSAKPALLKLTEKQVEQRAFHDLKVAPGYYTLTADQDARGMVEFQEGVELVDVRVPLFIRPEDDDEKQLLVEAIDVPAGTATLGRRLVNITIIKEQARDVVSFEQPEFSVSRGDQVARIPVIRRVLDGGKSQVSYRTQDGTAQGNRDYIPVEGELLFQPGEAWKELQVKLLELQEVDSLLRGRQVRRFHVQLSNPKFGAHLGQPHSTTIIIRDPDELDRSFTSQMLSSQPPPHGDLGAPQNPNAKAAGSRKIHFNWLPPSGKPMGYRVKYWIQGDSESEAHLLDSKVPSVELTNLYPYCDYEMKVCAYGAQGEGPYSSLVSCRTHQEVPSEPGRLAFNVVSSTVTQLSWAEPAETNGEITAYEVCYGLVNDDNRPIGPMKKVLVDNPKNRMLLIENLRESQPYRYTVKARNGAGWGPEREAIINLATQPKRPMSIPIIPDIPIVDAQSGEDYDSFLMYSDDVLRSPSGSQRPSVSDDTEHLVNGRMDFAFPGSTNSLHRMTTTSAAAYGTHLSPHVPHRVLSTSSTLTRDYNSLTRSEHSHSTTLPRDYSTLTSVSSHDSRLTAGVPDTPTRLVFSALGPTSLRVSWQEPRCERPLQGYSVEYQLLNGGELHRLNIPNPAQTSVVVEDLLPNHSYVFRVRAQSQEGWGREREGVITIESQVHPQSPLCPLPGSAFTLSTPSAPGPLVFTALSPDSLQLSWERPRRPNGDIVGYLVTCEMAQGGGPATAFRVDGDSPESRLTVPGLSENVPYKFKVQARTTEGFGPEREGIITIESQDGGPFPQLGSRAGLFQHPLQSEYSSITTTHTSATEPFLVDGPTLGAQHLEAGGSLTRHVTQEFVSRTLTTSGTLSTHMDQQFFQT

SEQ ID NO: 206 - protein, 742 aa, Homo sapiens
MDKFWWHAAWGLCLVPLSLAQIDLNITCRFAGVFHVEKNGRYSISRTEAADLCKAFNSTLPTMAQMEKALSIGFETCRYGFIEGHVVIPRIHPNSICAANNTGVYILTSNTSQYDTYCFNASAPPEEDCTSVTDLPNAFDGPITITIVNRDGTRYVQKGEYRTNPEDIYPSNPTDDDVSSGSSSERSSTSGGYIFYTFSTVHPIPDEDSPWITDSTDRIPATTLMSTSATATETATKRQETWDWFSWLFLPSESKNHLHTTTQMAGTSSNTISAGWEPNEENEDERDRHLSFSGSGIDDDEDFISSTISTTPRAFDHTKQNQDWTQWNPSHSNPEVLLQTTTRMTDVDRNGTTAYEGNWNPEAHPPLIHHEHHEEEETPHSTSTIQATPSSTTEETATQKEQWFGNRWHEGYRQTPKEDSHSTTGTAAASAHTSHPMQGRTTPSPEDSSWTDFFNPISHPMGRGHQAGRRMDMDSSHSITLQPTANPNTGLVEDLDRTGPLSMTTQQSNSQSFSTSHEGLEEDKDHPTTSTLTSSNRNDVTGGRRDPNHSEGSTTLLEGYTSHYPHTKESRTFIPVTSAKTGSFGVTAVTVGDSNSNVNRSLSGDQDTFHPSGGSHTTHGSESDGHSHGSQEGGANTTSGPIRTPQIPEWLIILASLLALALILAVCIAVNSRRRCGQKKKLVINSGNGAVEDRKPSGLNGEASKSQEMVHLVNKESSETPDQFMTADETRNLQNVDMKIGV

SEQ ID NO: 207 - protein, 1236 aa, Homo sapiens
MGGALGPALLLTSLFGAWAGLGPGQGEQGMTVAVVFSSSGPPQAQFRARLTPQSFLDLPLEIQPLTVGVNTTNPSSLLTQICGLLGAAHVHGIVFEDNVDTEAVAQILDFISSQTHVPILSISGGSAVVLTPKEPGSAFLQLGVSLEQQLQVLFKVLEEYDWSAFAVITSLHPGHALFLEGVRAVADASHVSWRLLDVVTLELGPGGPRARTQRLLRQLDAPVFVAYCSREEAEVLFAEAAQAGLVGPGHVWLVPNLALGSTDAPPATFPVGLISVVTESWRLSLRQKVRDGVAILALGAHSYWRQHGTLPAPAGDCRVHPGPVSPAREAFYRHLLNVTWEGRDFSFSPGGYLVQPTMVVIALNRHRLWEMVGRWEHGVLYMKYPVWPRYSASLQPVVDSRHLTVATLEERPFVIVESPDPGTGGCVPNTVPCRRQSNHTFSSGDVAPYTKLCCKGFCIDILKKLARVVKFSYDLYLVTNGKHGKRVRGVWNGMIGEVYYKRADMAIGSLTINEERSEIVDFSVPFVETGISVMVARSNGTVSPSAFLEPYSPAVWVMMFVMCLTVVAITVFMFEYFSPVSYNQNLTRGKKSGGPAFTIGKSVWLLWALVFNNSVPIENPRGTTSKIMVLVWAFFAVIFLASYTANLAAFMIQEQYIDTVSGLSDKKFQRPQDQYPPFRFGTVPNGSTERNIRSNYRDMHTHMVKFNQRSVEDALTSLKMGKLDAFIYDAAVLNYMAGKDEGCKLVTIGSGKVFATTGYGIAMQKDSHWKRAIDLALLQFLGDGETQKLETVWLSGICQNEKNEVMSSKLDIDNMAGVFYMLLVAMGLALLVFAWEHLVYWKLRHSVPNSSQLDFLLAFSRGIYSCFSGVQSLASPPRQASPDLTASSAQASVLKMLQAARDMVTTAGVSSSLDRATRTIENWGGGRRAPPPSPCPTPRSGPSPCLPTPDPPPEPSPTGWGPPDGGRAALVRRAPQPPGRPPTPGPPLSDVSRVSRRPAWEARWPVRTGHCGRHLSASERPLSPARCHYSSFPRADRSGRPFLPLFPEPPELEDLPLLGPEQLARREALLHAAWARGSRPRHASLPSSVAEAFARPSSLPAGCTGPACARPDGHSACRRLAQAQSMCLPIYREACQEGEQAGAPAWQHRQHVCLHAHAHLPFCWGAVCPHLPPCASHGSWLSGAWGPLGHRGRTLGLGTGYRDSGGLDEISSVARGTQGFPGPCTWRRISSLESEV

SEQ ID NO: 208 - DNA, 1004 bp, Homo sapiens
gcctcgctcgggcgcccagtggtcctgccgcctggtctcacctcgccatggttcgtctgcctctgcagtgcgtcctctggggctgcttgctgaccgctgtccatccagaaccacccactgcatgcagagaaaaacagtacctaataaacagtcagtgctgttctttgtgccagccaggacagaaactggtgagtgactgcacagagttcactgaaacggaatgccttccttgcggtgaaagcgaattcctagacacctggaacagagagacacactgccaccagcacaaatactgcgaccccaacctagggcttcgggtccagcagaagggcacctcagaaacagacaccatctgcacctgtgaagaaggctggcactgtacgagtgaggcctgtgagagctgtgtcctgcaccgctcatgctcgcccggctttggggtcaagcagattgctacaggggtttctgataccatctgcgagccctgcccagtcggcttcttctccaatgtgtcatctgctttcgaaaaatgtcacccttggacaagctgtgagaccaaagacctggttgtgcaacaggcaggcacaaacaagactgatgttgtctgtggtccccaggatcggctgagagccctggtggtgatccccatcatcttcgggatcctgtttgccatcctcttggtgctggtctttatcaaaaaggtggccaagaagccaaccaataaggccccccaccccaagcaggaaccccaggagatcaattttcccgacgatcttcctggctccaacactgctgctccagtgcaggagactttacatggatgccaaccggtcacccaggaggatggcaaagagagtcgcatctcagtgcaggagagacagtgaggctgcacccacccaggagtgtggccacgtgggcaaacaggcagttggccagagagcctggtgctgctgctgcaggggtgcaggcagaagcggggagctatgcccagtcagtgccagcccctc

SEQ ID NO: 209 - DNA, 3386 bp, Homo sapiens
gccgcggccagctccggcgggcagggggggcgctggagcgcagcgcagcgcagccccatcagtccgcaaagcggaccgagctggaagtcgagcgctgccgcgggaggcgggcgatgggggcaggtgccaccggccgcgccatggacgggccgcgcctgctgctgttgctgcttctgggggtgtcccttggaggtgccaaggaggcatgccccacaggcctgtacacacacagcggtgagtgctgcaaagcctgcaacctgggcgagggtgtggcccagccttgtggagccaaccagaccgtgtgtgagccctgcctggacagcgtgacgttctccgacgtggtgagcgcgaccgagccgtgcaagccgtgcaccgagtgcgtggggctccagagcatgtcggcgccgtgcgtggaggccgacgacgccgtgtgccgctgcgcctacggctactaccaggatgagacgactgggcgctgcgaggcgtgccgcgtgtgcgaggcgggctcgggcctcgtgttctcctgccaggacaagcagaacaccgtgtgcgaggagtgccccgacggcacgtattccgacgaggccaaccacgtggacccgtgcctgccctgcaccgtgtgcgaggacaccgagcgccagctccgcgagtgcacacgctgggccgacgccgagtgcgaggagatccctggccgttggattacacggtccacacccccagagggctcggacagcacagcccccagcacccaggagcctgaggcacctccagaacaagacctcatagccagcacggtggcaggtgtggtgaccacagtgatgggcagctcccagcccgtggtgacccgaggcaccaccgacaacctcatccctgtctattgctccatcctggctgctgtggttgtgggccttgtggcctacatagccttcaagaggtggaacagctgcaagcagaacaagcaaggagccaacagccggccagtgaaccagacgcccccaccagagggagaaaaactccacagcgacagtggcatctccgtggacagccagagcctgcatgaccagcagccccacacgcagacagcctcgggccaggccctcaagggtgacggaggcctctacagcagcctgcccccagccaagcgggaggaggtggagaagcttctcaacggctctgcgggggacacctggcggcacctggcgggcgagctgggctaccagcccgagcacatagactcctttacccatgaggcctgccccgttcgcgccctgcttgcaagctgggccacccaggacagcgccacactggacgccctcctggccgccctgcgccgcatccagcgagccgacctcgtggagagtctgtgcagtgagtccactgccacatccccggtgtgagcccaaccggggagcccccgccccgccccacattccgacaaccgatgctccagccaacccctgtggagcccgcacccccaccctttggggggggcccgcctggcagaactgagctcctctgggcaggacctcagagtccaggccccaaaaccacagccctgtcagtgcagcccgtgtggccccttcacttctgaccacacttcctgtccagagagagaagtgcccctgctgcctccccaaccctgcccctgccccgtcaccatctcaggccacctgcccccttctcccacactgctaggtgggccagcccctcccaccacagcaggtgtcatatatggggggccaacaccagggatggtactagggggaagtgacaaggccccagagactcagagggaggaatcgaggaaccagagccatggactctacactgtgaacttggggaacaagggtggcatcccagtggcctcaaccctccctcagcccctcttgccccccaccccagcctaagatgaagaggatcggaggcttgtcagagctgggaggggttttcgaagctcagcccacccccctcattttggatataggtcagtgaggcccagggagaggccatgattcgcccaaagccagacagcaacggggaggccaagtgcaggctggcaccgccttctctaaatgaggggcctcaggtttgcctgagggcgaggggagggtggcaggtgaccttctgggaaatggcttgaagccaagtcagctttgccttccacgctgtctccagacccccaccccttccccactgcctgcccacccgtggagatgggatgcttgcctagggcctggtccatgatggagtcaggtttggggttcgtggaaagggtgctgcttccctctgcctgtccctctcaggcatgcctgtgtgacatcagtggcatggctccagtctgctgccctccatcccgacatggacccggagctaacactggcccctagaatcagcctaggggtcagggaccaaggacccctcaccttgcaacacacagacacacgcacacacacacacaggaggagaaatctcacttttctccatgagttttttctcttgggctgagactggatactgcccggggcagctgccagagaagcatcggagggaattgaggtctgctcggccgtcttcactcgcccccgggtttggcgggccaaggactgccgaccgaggctggagctggcgtctgtcttcaagggcttacacgtggaggaatgctcccccatcctccccttccctgcaaacatggggttggctgggcccagaaggttgcgatgaagaaaagcgggccagtgtgggaatgcggcaagaaggaattgacttcgactgtgacctgtggggatttctcccagctctagacaaccctgcaaaggactgttttttcctgagcttggccagaagggggccatgaggcctcagtggactttccaccccctccctggcctgttctgttttgcctgaagttggagtgagtgtggctcccctctatttagcatgacaagccccaggcaggctgtgcgctgacaaccaccgctccccagcccagggttcccccagccctgtggaagggactaggagcactgtagtaaatggcaattctttgacctcaacctgtgatgaggggaggaaactcacctgctggcccctcacctgggcacctggggagtgggacagagtctgggtgtatttattttcctccccagcaggtggggagggggtttggtggcttgcaagtatgttttagcatgtgtttggttctggggcccctttttactccccttgagctgagatggaacccttttggcccccagctgggggccatgagctccagacccccagcaaccctcctatcacctcccctccttgcctcctgtgtaatcatttcttgggccctcctgaaacttacacacaaaacgttaagtgatgaacattaaatagcaaag

SEQ ID NO: 210 - DNA, 1352 bp, Homo sapiens
gtgctgtgaggcttgcccgcggacagtaaacttgcaggggcgagagggagggacatcgattaaacctaaatcgtgggcgttcagtcctcagggcaccgagcgcgtgaaaactccagcggactctgctggaaaggagatcatgccctctaagtctctttccaacctctcggtgaccaccggcgcgaatgagagcggttccgttcccgaggggtgggaaagggatttcctgccggcctcggacgggaccaccacggagttggtgatccgctgtgtgatcccgtccctctacctgctcatcatcaccgtgggcttgctgggcaacatcatgctggtgaagatcttcatcaccaacagcgccatgaggagcgtccccaacatcttcatctctaacctggcggccggggacttgctgctgctgctcacctgcgtcccggtggacgcctcgcgctacttcttcgacgagtggatgtttggcaaggtgggctgcaaactgatccctgtcatccagctcacttccgtgggggtttccgtgttcactctcactgccctcagcgccgacaggtacagagccatcgttaaccccatggacatgcagacgtcaggggcattgctgcggacctgtgtgaaggccatgggtatctgggtggtctccgtgttgctggcagttcccgaagcggtgttttcagaagtggctcgcatcagtagcttggataatagcagcttcacagcatgtatcccataccctcaaacagatgaattacatccaaagattcattcagtgctcattttcttggtctatttcctcataccacttgctattattagcatttattattatcatattgcaaagaccttaattaaaagcgcacacaatcttcctggagaatacaatgaacataccaaaaaacagatggaaacacggaaacgcctggctaaaattgtgcttgtctttgtgggctgtttcatcttctgttggtttccaaaccacatcctttacatgtatcggtctttcaactataatgagattgatccatctctaggccacatgattgtcaccttagttgcccgggttctcagttttggcaattcttgtgtcaacccatttgctctttacctactcagtgaaagcttcaggaggcatttcaacagccaactctgctgtgggaggaagtcctatcaagagagaggaaccagctacctactcagctcttcagcggtgcgtatgacatctctgaaaagcaatgctaagaacatggtgaccaattctgttttactaaatgggcacagcatgaagcaggaaatggcaatgtgattttggccattcaactcactacctggagagaacttagtaa

SEQ ID NO: 211 - DNA, 598 bp, Homo sapiens
cgaaggcgcggcgggctcgggggcggagaacctgacctgcgagatccgagccgagcgctttcttttctgcgcgtggcgggaggggccagcggcgcccgcggacgtccggtactcgctgcgagtccttaactccacgggtcacgacgtggcgcgatgcatggccgaccctggggatgacgtcatgacacagtgcattgcgaacgacttgtcactgatggggagtgaggcctacttggtcgtgaccggtcggagcggagcggggccagtgcggatcctggacgacttggtggctacgaaggcgctcgagcgactcgatccctcacgtgacgtcaccgagtcctgtaactattcccactgcaccgagtcgtgggcgccgccctagacctgtgcatcctatgaggtgcgggacttgcagtgtgaggtccagtggcagagcacatatccaggaagctcactccagaatgtgctcatccgcgaggagaggcggtttgcgtttcggacgctgttccgctcgaggttacattgctaaagtgcgcacagggtacacgaggatgagcactgtggcgaatggtataagcggcatcctgttatggctgag

SEQ ID NO: 212 - DNA, 617 bp, Homo sapiens
cggccgctgcacagcagcccattgctggacatgcaggtgtcagtacgcgtggtacagttgcagtagtagccggtccagtcggagtcacacaggcagtccccacagctgcactggccatggcctgagcacatctcccccttgtagcggacacaggagaagtcgtcacactcgcagtacttgcccgtgatcttgccaaagtcactgctgtggcagacacattgaccacagaggcactcgccccgctggctgcagacgggctgaccctctcgggggctgcactcgtcctgctgggaagggcgatagtcctcctctgagcactcacactgggatcccagccagccaggcccacaacggcataccccacactcaaaggtcccattgccattgttgcagcgatggctattaggttcagcttgggcctggcaggcacagtcacaatcaaaggtgacctggacgatcaggctgtccttgaagcccacgggctttatggtaaaggacttctccttctcctggggacagcctcgcaccttggcctcaatgctgaagctcaccgtgtctccaatcttgagtcccatacaagacttgaggccagggatgacctcattggtgaggcaggt

SEQ ID NO: 213 - DNA, 754 bp, Homo sapiens
  misc_feature (454)..(454): "n is A or C or G or T"
  misc_feature (486)..(486): "n is A or C or G or T"
  misc_feature (637)..(637): "n is A or C or G or T"
gcggccgctgcacagcagcccattgctggacatgcaggtgtcagtacgcgtggtacagttgcagtagtagccggtccagtcggagtcacacaggcagtccccacagctgcactggccatggcctgagcacatctcccccttgtagcggacacaggagaagtcgtcacactcgcagtacttgcccgtgatcttgccaaagtcactgctgtggcagacacattgaccacagaggcactcgccccgctggctgcagacgggctgaccctcccgggggctgcattcgtcctgctgggaagggcgatagtcctcctctgagcactcacactgggatcccagccagccaggcccacaacggcataccccacactcaaaggtcccattgccattgttgcagcgatggctattaggttcagcttgggcctggcaggcacagtcacaatcaaaggtgacctgnacgatcaggctgtccttgaagcccacgggctntatggtaaaggacttctccttctcctggggacagcctcgcaccttggcctcaatgctgaagctcaccgtgtctccaatcttgagtcccatacaagacttgaggccagggatgacctcattgttgaggcatgtggcattgaaggatagagancactcttcaggacgtcacgcactttcagctcgactttagaacggaatttccataagcatcaacaatgagcctgaggacattgcctgaatccatggacagaacccccactgtggtccc

SEQ ID NO: 214 - DNA, 563 bp, Homo sapiens
cggccgctgcacagcagcccattgctggacatgcaggtgtcagtacgcgtggtacagttgcagtagtagccggtccagtcggagtcacacaggcagtccccacagctgcactggccatggcctgagcacatctcccccttgtagcggacacaggagaagtcgtcacactcgcagtacttgcccgtgatcttgccaaagtcactgctgtggcagacacattgaccacagaggcactcgccccgctggctgcagacgggctgaccctcccgggggctgcattcgtcctgctgggaagggcgatagtcctcctctgagcactcacactgggatcccagccagccaggcccacaacggcataccccacactcaaaggtcccattgccattgttgcagcgatggctattatgttcagcttgggcctggcaggcacagtcacaatcaaaggtgacctggacgatcaggctgtccttgaagcccacgggctttatggtaaaggaattctccttttccttgggacagactcgcaccttggccctaatgctgaagctcaccgagatcttcat

SEQ ID NO: 215 - DNA, 719 bp, Homo sapiens
aagatgggattcttcaaacgggcgaagcaccccgaggccaccgtgccccagtaccatgcggtgaagattcctcgggaagaccgacagcagttcaaggaggagaagacgggcaccatcctgaggaacaactggggcagcccccggcgggagggcccggatgcacaccccatcctggctgctgacgggcatcccgagctgggccccgatgggcatccagggccaggcaccgcctaggttcccatgtcccagcctgcgctgtggctgccctccatcccttccccagagatggctccttgggatgaagagggtagagtgggctgctggtgtcacatcaagaatttggcaggatcggcttcctcaggggcacagacctctcccacccacaagaactcctcccacccaacttccccttagagtgctgtgagatgagagtgggtaaatcagggacagggccatggggtagggtgagaagggcaggggtgtcctgatgcaaaggtggggagaaggatcctaatcccttcctctcccattcaccctgtgtaacaggaccccaaggacctgcctccccggaagtgccttaacctagagggtcggggaggaggttgtgtcactgactcaaggctgctccttctctagtttcccctctcatctgaccttagtttgctgccatcagtctagtggtttcgtggtttcgtctatttattaaaaaatcggaaccc

SEQ ID NO: 216 - protein, 6 aa, Homo sapiens
MHSSAL

SEQ ID NO: 217 - protein, 144 aa, Homo sapiens
MWLQSLLLLGTVACSISAPARSPSPSTQPWEHVNAIQEARRLLNLSRDTAAEMNETVEVISEMFDLQEPTCLQTRLELYKQGLRGSLTKLKGPLTMMASHYKQHCPPTPETSCATQIITFESFKENLKDFLLVIPFDCWEPVQE

SEQ ID NO: 218 - protein, 353 aa, Homo sapiens
METNFSIPLNETEEVLPEPAGHTVLWIFSLLVHGVTFVFGVLGNGLVIWVAGFRMTRTVNTICYLNLALADFSFSAILPFRMVSVAMREKWPFASFLCKLVHVMIDINLFVSVYLITIIALDRCICVLHPAWAQNHRTMSLAKRVMTGLWIFTIVLTLPNFIFWTTISTTNGDTYCIFNFAFWGDTAVERLNVFITMAKVFLILHFIIGFTVPMSIITVCYGIIAAKIHRNHMIKSSRPLRVFAAVVASFFICWFPYELIGILMAVWLKEMLLNGKYKIILVLINPTSSLAFFNSCLNPILYVFMGRNFQERLIRSLPTSLERALTEVPDSAQTSNTHTTSASPPEETELQAM

SEQ ID NO: 219 - protein, 142 aa, Homo sapiens
MSESLVVCDVAEDLVEKLRKFRFRKETNNAAIIMKIDKDKRLVVLDEELEGISPDELKDELPERQPRFIVYSYKYQHDDGRVSYPLCFIFSSPVGCKPEQQMMYAGSKNKLVQTAELTKVFEIRNTEDLTEEWLREKLGFFH

SEQ ID NO: 220 - protein, 240 aa, Homo sapiens
MSRSNRQKEYKCGDLVFAKMKGYPHWPARIDEMPEAAVKSTANKYQVFFFGTHETAFLGPKDLFPYEESKEKFGKPNKRKGFSEGLWEIENNPTVKASGYQSSQKKSCVEEPEPEPEAAEGDGDKKGNAEGSSDEEGKLVIDEPAKEKNEKGALKRRAGDLLEDSPKRPKEAENPEGEEKEAATLEVERPLPMEVEKNSTPSEPGSGRGPPQEEEEEEDEEEEATKEDAEAPGIRDHESL

SEQ ID NO: 221 - protein, 92 aa, Homo sapiens
MQVSTAALAVLLCTMALCNQFSASLAADTPTACCFSYTSRQIPQNFIADYFETSSQCSKPGVIFLTKRSRQVCADPSEEWVQKYVSDLELSA

SEQ ID NO: 222 - protein, 99 aa, Homo sapiens
MKVSAALLCLLLIAATFIPQGLAQPDAINAPVTCCYNFTNRKISVQRLASYRRITSSKCPKEAVIFKTIVAKEICADPKQKWVQDSMDHLDKQTQTPKT

SEQ ID NO: 223 - protein, 252 aa, Homo sapiens
MGVLLTQRTLLSLVLALLFPSMASMAAIGSCSKEYRVLLGQLQKQTDLMQDTSRLLDPYIRIQGLDVPKLREHCRERPGAFPSEETLRGLGRRGFLQTLNATLGCVLHRLADLEQRLPKAQDLERSGLNIEDLEKLQMARPNILGLRNNIYCMAQLLDNSDTAEPTKAGRGASQPPTPTPASDAFQRKLEGCRFLHGYHRFMHSVGRVFSKWGESPNRSRRHSPHQALRKGVRRTRPSRKGKRLMTRGQLPR

SEQ ID NO: 224 - protein, 417 aa, Homo sapiens
MEKERETLQAWKERVGQELDRVVAFWMEHSHDQEHGGFFTCLGREGRVYDDLKYVWLQGRQVWMYCRLYRTFERFRHAQLLDAAKAGGEFLLRYARVAPPGKKCAFVLTRDGRPVKVQRTIFSECFYTMAMNELWRATGEVRYQTEAVEMMDQIVHWVQEDASGLGRPQLQGAPAAEPMAVPMMLLNLVEQLGEADEELAGKYAELGDWCARRILQHVQRDGQAVLENVSEGGKELPGCLGRQQNPGHTLEAGWFLLRHCIRKGDPELRAHVIDKFLLLPFHSGWDPDHGGLFYFQDADNFCPTQLEWAMKLWWPHSEAMIAFLMGYSDSGDPVLLRLFYQVAEYTFRQFRDPEYGEWFGYLSREGKVALSIKGGPFKGCFHVPRCLAMCEEMLGALLSRPAPAPSPAPTPACRGAE

SEQ ID NO: 225 - protein, 114 aa, Homo sapiens
MTCKMSQLERNIETIINTFHQYSVKLGHPDTLNQGEFKELVRKDLQNFLKKENKNEKVIEHIMEDLDTNADKQLSFEEFIMLMARLTWASHEKMHEGDEGPGHHHKPGLGEGTP

SEQ ID NO: 226 - protein, 149 aa, Homo sapiens
MPVMRLFPCFLQLLAGLALPAVPPQQWALSAGNGSSEVEVVPFQEVWGRSYCRALERLVDVVSEYPSEVEHMFSPSCVSLLRCTGCCGDENLHCVPVETANVTMQLLKIRSGDRPSYVELTFSQHVRCECRPLREKMKPERCGDAVPRR

SEQ ID NO: 227 - protein, 191 aa, Homo sapiens
MNFLLSWVHWSLALLLYLHHAKWSQAAPMAEGGGQNHHEVVKFMDVYQRSYCHPIETLVDIFQEYPDEIEYIFKPSCVPLMRCGGCCNDEGLECVPTEESNITMQIMRIKPHQGQHIGEMSFLQHNKCECRPKKDRARQENPCGPCSERRKHLFVQDPQTCKCSCKNTDSRCKARQLELNERTCRCDKPRR

SEQ ID NO: 228 - protein, 308 aa, Homo sapiens
MWKRWLALALALVAVAWVRAEEELRSKSKICANVFCGAGRECAVTEKGEPTCLCIEQCKPHKRPVCGSNGKTYLNHCELHRDACLTGSKIQVDYDGHCKEKKSVSPSASPVVCYQSNRDELRRRIIQWLEAEIIPDGWFSKGSNYSEILDKYFKNFDNGDSRLDSSEFLKFVEQNETAINITTYPDQENNKLLRGLCVDALIELSDENADWKLSFQEFLKCLNPSFNPPEKKCALEDETYADGAETEVDCNRCVCACGNWVCTAMTCDGKNQKGAQTQTEEEMTRYVQELQKHQETAEKTKRVSTKEI

SEQ ID NO: 229 - protein, 711 aa, Homo sapiens
MGWLPLLLLLTQCLGVPGQRSPLNDFQVLRGTELQHLLHAVVPGPWQEDVADAEECAGRCGPLMDCRAFHYNVSSHGCQLLPWTQHSPHTRLRRSGRCDLFQKKDYVRTCIMNNGVGYRGTMATTVGGLPCQAWSHKFPNDHKYTPTLRNGLEENFCRNPDGDPGGPWCYTTDPAVRFQSCGIKSCREAACVWCNGEEYRGAVDRTESGRECQRWDLQHPHQHPFEPGKFLDQGLDDNYCRNPDGSERPWCYTTDPQIEREFCDLPRCGSEAQPRQEATTVSCFRGKGEGYRGTANTTTAGVPCQRWDAQIPHQHRFTPEKYACKDLRENFCRNPDGSEAPWCFTLRPGMRAAFCYQIRRCTDDVRPQDCYHGAGEQYRGTVSKTRKGVQCQRWSAETPHKPQFTFTSEPHAQLEENFCRNPDGDSHGPWCYTMDPRTPFDYCALRRCADDQPPSILDPPDQVQFEKCGKRVDRLDQRRSKLRVVGGHPGNSPWTVSLRNRQGQHFCGGSLVKEQWILTARQCFSSCHMPLTGYEVWLGTLFQNPQHGEPSLQRVPVAKMVCGPSGSQLVLLKLERSVTLNQRVALICLPPEWYVVPPGTKCEIAGWGETKGTGNDTVLNVAFLNVISNQECNIKHRGRVRESEMCTEGLLAPVGACEGDYGGPLACFTHNCWVLEGIIIPNRVCARSRWPAVFTRVSVFVDWIHKVMRLG

SEQ ID NO: 230 - protein, 166 aa, Homo sapiens
MKYTSYILAFQLCIVLGSLGCYCQDPYVKEAENLKKYFNAGHSDVADNGTLFLGILKNWKEESDRKIMQSQIVSFYFKLFKNFKDDQSIQKSVETIKEDMNVKFFNSNKKKRDDFEKLTNYSVTDLNVQRKAIHELIQVMAELSPAAKTGKRKRSQMLFRGRRASQ

SEQ ID NO: 231 - DNA, 1151 bp, Homo sapiens
acagcctctcccacaggtaccatgaaggtctccgcggcagccctcgctgtcatcctcattgctactgccctctgcgctcctgcatctgcctccccatattcctcggacaccacaccctgctgctttgcctacattgcccgcccactgccccgtgcccacatcaaggagtatttctacaccagtggcaagtgctccaacccagcagtcgtctttgtcacccgaaagaaccgccaagtgtgtgccaacccagagaagaaatgggttcgggagtacatcaactctttggagatgagctaggatggagagtccttgaacctgaacttacacaaatttgcctgtttctgcttgctcttgtcctagcttgggaggcttcccctcactatcctaccccacccgctccttgaagggcccagattctaccacacagcagcagttacaaaaaccttccccaggctggacgtggtggctcacgcctgtaatcccagcactttgggaggccaaggtgggtggatcacttgaggtcaggagttcgagaccagcctggccaacatgatgaaaccccatctctactaaaaatacaaaaaattagccgggcgtggtagcgggcgcctgtagtcccagctactcgggaggctgaggcaggagaatggcgtgaacccgggaggcggagcttgcagtgagccgagatcgcgccactgcactccagcctgggcgacagagcgagactccgtctcaaaaaaaaaaaaaaaaaaaaaaatacaaaaattagccgggcgtggtggcccacgcctgtaatcccagctactcgggaggctaaggcaggaaaattgtttgaacccaggaggtggaggctgcagtgagctgagattgtgccacttcactccagcctgggtgacaaagtgagactccgtcacaacaacaacaacaaaaagcttccccaactaaagcctagaagagcttctgaggcgctgctttgtcaaaaggaagtctctaggttctgagctctggctttgccttggctttgccagggctctgtgaccaggaaggaagtcagcatgcctctagaggcaaggaggggaggaacactgcactcttaagcttccgccgtctcaacccctcacaggagcttactggcaaacatgaaaaatcgg

SEQ ID NO: 232 - DNA, 956 bp, Homo sapiens
gccttgaagagatataaactagatcaatttctttcacaggatcaactaaacagtgtaccacaatgaattctgaacttgactattatgaaaagtttgaagaagtccatgggattctaatgtataaagattttgtcaaatattgggataatgtggaagcgttccaggcaagaccagatgatcttgtcattgccacctaccctaaatctggtacaacctgggttagtgaaattgtgtatatgatctataaagagggtgatgtggaaaagtgcaaagaagatgtaatttttaatcgaatacctttcctggaatgcagaaaagaaaacctcatgaatggagtaaaacaattagatgagatgaattctcctagaattgtgaagactcatttgccacctgaacttcttcctgcctcattttgggaaaaggattgtaagataatctatctttgccggaatgcaaaggatgtggctgtttccttttattatttctttctaatggtggctggtcatccaaatcctggatcctttccagagtttgtggagaaattcatgcaaggacaggttccttatggttcctggtataaacatgtaaaatcttggtgggaaaagggaaagagtccacgtgtactatttcttttctacgaagacctgaaagaggatatcagaaaagaggtgataaaattgatacatttcctggaaaggaagccatcagaggagcttgtggacaggattatacatcatacttcgttccaagagatgaagaacaatccatccacaaattacacaacactgccagacgaaattatgaaccagaaattgtcgcccttcatgagaaagggaattacaggagactggaaaaatcactttacagtagccctgaatgaaaaatttgataaacattatgagcagcaaatgaaggaatctacactgaagtttcgaactgagatctaagaaggtctt

SEQ ID NO: 233 - DNA, 3853 bp, Homo sapiens
acgcgctcacacacagagagaaaatccttctgcctgttgatttatggaaacaattatgattctgctggagaacttttcagctgagaaatagtttgtagctacagtagaaaggctcaagttgcaccaggcagacaacagacatggaattcttatatatccagctgttagcaacaaaacaaaagtcaaatagcaaacagcgtcacagcaactgaacttactacgaactgtttttatgaggatttatcaacagagttatttaaggaggaatcctgtgttgttatcaggaactaaaaggataaggctaacaatttggaaagagcaagtactctttcttaaatcaatctacaattcacagataggaagaggtcaatgacctaggagtaacaatcaactcaagattcattttcattatgttattcatgaacacccggagcactacactataatgcacaaatggatactgacatggatcctgccaactttgctctacagatcatgctttcacattatctgtctagtgggtactatatctttagcttgcaatgacatgactccagagcaaatggctacaaatgtgaactgttccagccctgagcgacacacaagaagttatgattacatggaaggaggggatataagagtgagaagactcttctgtcgaacacagtggtacctgaggatcgataaaagaggcaaagtaaaagggacccaagagatgaagaataattacaatatcatggaaatcaggacagtggcagttggaattgtggcaatcaaaggggtggaaagtgaattctatcttgcaatgaacaaggaaggaaaactctatgcaaagaaagaatgcaatgaagattgtaacttcaaagaactaattctggaaaaccattacaacacatatgcatcagctaaatggacacacaacggaggggaaatgtttgttgccttaaatcaaaaggggattcctgtaagaggaaaaaaaacgaagaaagaacaaaaaacagcccactttcttcctatggcaataacttaattgcatatggtatataaagaacccagttccagcagggagatttctttaagtggactgttttctttcttctcaaaattttctttccttttattttttagtaatcaagaaaggctggaaaaactactgaaaaactgatcaagctggacttgtgcatttatgtttgttttaagacactgcattaaagaaagatttgaaaagtatacacaaaaatcagatttagtaactaaaggttgtaaaaaattgtaaaactggttgtacaatcatgatgttagtaacagtaatttttttcttaaattaatttacccttaagagtatgttagatttgattatctgataatgattatttaaatattcctatctgcttataaaatggctgctataataataataatacagatgttgttatataaggtatatcagacctacaggcttctggcaggatttgtcagataatcaagccacactaactatggaaaatgagcagcattttaaatgctttctagtgaaaaattataatctacttaaactctaatcagaaaaaaaattctcaaaaaaactattatgaaagtcaataaaatagataatttaacaaaagtacaggattagaacatgcttatacctataaataagaacaaaatttctaatgctgctcaagtggaaagggtattgctaaaaggatgtttccaaaaatcttgtatataagatagcaacagtgattgatgataatactgtacttcatcttacttgccacaaaataacattttataaatcctcaaagtaaaattgagaaatctttaagtttttttcaagtaacataatctatctttgtataattcatatttgggaatatggcttttaataatgttcttcccacaaataatcatgcttttttcctatggttacagcattaaactctattttaagttgtttttgaactttattgttttgttatttaagtttatgttatttataaaaaaaaaaccttaataagctgtatctgtttcatatgcttttaattttaaaggaataacaaaactgtctggctcaacggcaagtttccctcccttttctgactgacactaagtctagcacacagcacttgggccagcaaatcctggaagcagacaaaaataagagcctgaagcaatgcttacaatagatgtctcacacagaacaatacaaatatgtaaaaactctttcaccacatattcttgccaattaattggatcatataagtaaaatcattacaaatataagtatttacaggattttaaagttagaatatatttgaatgcatgggtagaaaatatcatattttaaaactatgtatatttaaatttagtaattttctaatctctagaaatctctgctgttcaaaaggtggcagcactgaaagttgttttcctgttagatggcaagagcacaatgcccaaaatagaagatgcagttaagaataaggggccctgaatgtcatgaaggcttgaggtcagcctacagataacaggattattacaaggatgaatttccacttcaaaagtctttcattggcagatcttggtagcactttatatgttcaccaatgggaggtcaatatttatctaatttaaaaggtatgctaaccactgtggttttaatttcaaaatatttgtcattcaagtccctttacataaatagtatttggtaatacatttatagatgagagttatatgaaaaggctaggtcaacaaaaacaatagattcatttaattttcctgtggttgacctatacgaccaggatgtagaaaactagaaagaactgcccttcctcagatatactcttgggagagagcatgaatggtattctgaactatcacctgattcaaggactttgctagctaggttttgaggtcaggcttcagtaactgtagtcttgtgagcatattgagggcagaggaggacttagtttttcatatgtgtttccttagtgcctagcagactatctgttcataatcagttttcagtgtgaattcactgaatgtttatagacaaaagaaaatacacactaaaactaatcttcattttaaaagggtaaaacatgactatacagaaatttaaatagaaatagtgtatatacatataaaatacaagctatgttaggaccaaatgctctttgtctatggagttatacttccatcaaattacatagcaatgctgaattaggcaaaaccaacatttagtggtaaatccattcctggtagtataagtcacctaaaaaagacttctagaaatatgtactttaattatttgtttttctcctatttttaaatttattatgcaaattttagaaaataaaatttgctctagttacacacctttagaattctagaatattaaaactgtaaggggcctccatccctcttactcatttgtagtctaggaaattgagattttgatacacctaaggtcacgcagctgggtagatatacagctgtcacaagagtctagatcagttagcacatgctttctactcttcgattattagtattattagctaatggtctttggcatgtttttgttttttatttctgttgagatatagcctttacatttgtacacaaatgtgactatgtcttggcaatgcacttcatacacaatgactaatctatactgtgatgatttgactcaaaaggagaaaagaaattatgtagttttcaattctgattcctattcaccttttgtttatgaatggaaagctttgtgcaaaatatacatataagcagagtaagccttttaaaaatgttctttgaaagataaaattaaatacatgagtttctaacaattaga

SEQ ID NO: 234 - DNA, 1057 bp, Homo sapiens
ggaacccgtggtcctccgcttcatgattttctgccgtctcttggcaaaaatggcaaataatgatgctgttctgaagagactggagcagaagggtgcagaggcagatcaaatcattgaatatcttaagcagcaagtttctctacttaaggagaaagcaattttgcaggcaactttgagggaagagaagaaacttcgagttgaaaatgctaaactgaagaaagaaattgaagaactgaaacaagagctaattcaggcagaaattcaaaatggagtgaagcaaatagcatttccatctggtactccactgcacgctaattctatggtttctgaaaatgtgatacagtctacagcagtaacaaccgtatcttctggtaccaaagaacagataaaaggaggaacaggagacgaaaagaaagcgaaagagaaaattgaaaagaaaggagagaagaaggagaaaaaacagcaatcaatagctggaagtgccgactctaagccaatagatgtttcccgtctggatcttcgaattggttgcatcataactgctagaaaacaccctgatgcagattctttgtatgtggaagaagtagatgtcggagaaatagccccaaggacagttgtcagtggcctggtgaatcatgttcctcttgaacagatgcaaaatcggatggtgattttactttgtaacctgaaacctgcaaagatgaggggagtattatctcaagcaatggtcatgtgtgctagttcaccagagaaaattgaaatcttggctcctccaaatgggtctgttcctggagacagaattacttttgatgctttcccaggagagcctgacaaggagctgaatcctaagaagaagatttgggagcagatccagcctgatcttcacactaatgatgagtgtgtggctacatacaaaggagttccctttgaggtgaaagggaagggagtatgtagggctcaaaccatgagcaacagtggaatcaaataaaatgcttccactaccaaaagacattagagaaaaccttaaaagtaataaagagaaatatatttgtcactt

SEQ ID NO: 235 - DNA, 478 bp, Homo sapiens
tccccaaggctaggaggccaacctactaacaggtgggtgggtatggtgtgtggtttcactcagttcttctcatggggtttctctgagctccattcataccagaaagggagcaggagagagaggacaagtggatccaacagccttcgctccaggggaatcagggcatcgcctccttttctgggaggacactcccttctgatggtgaatgggaactcccttcctcctgcagcagcctgcctgcagctgtcctggtagaacagtgtggacattgcagaagctgtcactgccccagaaagaaagcaccccagagccaaggcaaagagtcttgaaagcgccacaagcagcagctgctgagccatggctgaaggggaaatcaccaccttcacagccctgaccgagaagtttaatctgcctccagggaattacaagaagcccaaactcctctactgtagcaacgggggccacttcctgaggatcc

SEQ ID NO: 236 - protein, 91 aa, Homo sapiens
MCPCPLHRGRGPPAVCACSAGRLGLRSSAAQLTAARLKALGDELHQRTMWRRRARSRRAPAPGALPTYWPWLCAAAQVAALAAWLLGRRNL

SEQ ID NO: 237 - protein, 1304 aa, Homo sapiens [sequence omitted]

SEQ ID NO: 238 - protein, 482 aa, Homo sapiens
MAEMGSKGVTAGKIASNVQKKLTRAQEKVLQKLGKADETKDEQFEQCVQNFNKQLTEGTRLQKDLRTYLASVKAMHEASKKLNECLQEVYEPDWPGRDEANKIAENNDLLWMDYHQKLVDQALLTMDTYLGQFPDIKSRIAKRGRKLVDYDSARHHYESLQTAKKKDEAKIAKAEEELIKAQKVFEEMNVDLQEELPSLWNSRVGFYVNTFQSIAGLEENFHKEMSKLNQNLNDVLVGLEKQHGSNTFTVKAQPSDNAPAKGNKSPSPPDGSPAATPEIRVNHEPEPAGGATPGATLPKSPSQLRKGPPVPPPPKHTPSKEVKQEQILSLFEDTFVPEISVTTPSQPAEASEVAGGTQPAAGAQEPGETAASEAASSSLPAVVVETFPATVNGTVEGGSGAGRLDLPPGFMFKVQAQHDYTATDTDELQLKAGDVVLVIPFQNPEEQDEGWLMGVKESDWNQHKELEKCRGVFPENFTERVP

SEQ ID NO: 239 - protein, 1124 aa, Homo sapiens; identical to SEQ ID NO: 151

SEQ ID NO: 240 - protein, 750 aa, Homo sapiens
MENSLRCVWVPKLAFVLFGASLLSAHLQVTGFQIKAFTALRFLSEPSDAVTMRGGNVLLDCSAESDRGVPVIKWKKDGIHLALGMDERKQQLSNGSLLIQNILHSRHHKPDEGLYQCEASLGDSGSIISRTAKVAVAGPLRFLSQTESVTAFMGDTVLLKCEVIGEPMPTIHWQKNQQDLTPIPGDSRVVVLPSGALQISRLQPGDIGIYRCSARNPASSRTGNEAEVRILSDPGLHRQLYFLQRPSNVVAIEGKDAVLECCVSGYPPPSFTWLRGEEVIQLRSKKYSLLGGSNLLISNVTDDDSGMYTCVVTYKNENISASAELTVLVPPWFLNHPSNLYAYESMDIEFECTVSGKPVPTVNWMKNGDVVIPSDYFQIVGGSNLRILGVVKSDEGFYQCVAENEAGNAQTSAQLIVPKPAIPSSSVLPSAPRDVVPVLVSSRFVRLSWRPPAEAKGNIQTFTVFFSREGDNRERALNTTQPGSLQLTVGNLKPEAMYTFRVVAYNEWGPGESSQPIKVATQPELQVPGPVENLQAVSTSPTSILITWEPPAYANGPVQGYRLFCTEVSTGKEQNIEVDGLSYKLEGLKKFTEYSLRFLAYNRYGPGVSTDDITVVTLSDVPSAPPQNVSLEVVNSRSIKVSWLPPPSGTQNGFITGYKIRHRKTTRRGEMETLEPNNLWYLFTGLEKGSQYSFQVSAMTVNGTGPPSNWYTAETPENDLDESQVPDQPSSLHVRPQTNCIIMSWTPPLN

SEQ ID NO: 241 - protein, 671 aa, Homo sapiens
MADPAAGPPPSEGEESTVRFARKGALRQKNVHEVKNHKFTARFFKQPTFCSHCTDFIWGFGKQGFQCQVCCFVVHKRCHEFVTFSCPGADKGPASDDPRSKHKFKIHTYSSPTFCDHCGSLLYGLIHQGMKCDTCMMNVHKRCVMNVPSLCGTDHTERRGRIYIQAHIDRDVLIVLVRDAKNLVPMDPNGLSDPYVKLKLIPDPKSESKQKTKTIKCSLNPEWNETFRFQLKESDKDRRLSVEIWDWDLTSRNDFMGSLSFGISELQKASVDGWFKLLSQEEGEYFNVPVPPEGSEANEELRQKFERAKISQGTKVPEEKTTNTVSKFDNNGNRDRMKLTDFNFLMVLGKGSFGKVMLSERKGTDELYAVKILKKDVVIQDDDVECTMVEKRVLALPGKPPFLTQLHSCFQTMDRLYFVMEYVNGGDLMYHIQQVGRFKEPHAVFYAAEIAIGLFFLQSKGIIYRDLKLDNVMLDSEGHIKIADFGMCKENIWDGVTTKTFCGTPDYIAPEIIAYQPYGKSVDWWAFGVLLYEMLAGQAPFEGEDEDELFQSIMEHNVAYPKSMSKEAVAICKGLMTKHPGKRLGCGPEGERDIKEHAFFRYIDWEKLERKEIQPPYKPKARDKRDTSNFDKEFTRQPVELTPTDKLFIMNLDQNEFAGFSYTNPEFVINV

SEQ ID NO: 242 - protein, 163 aa, Homo sapiens [sequence omitted]

SEQ ID NO: 243 - protein, 375 aa, Homo sapiens
MDALQLANSAFAVDLFKQLCEKEPLGNVLFSPICLSTSLSLAQVGAKGDTANEIGQVLHFENVKDIPFGFQTVTSDVNKLSSFYSLKLIKRLYVDKSLNLSTEFISSTKRPYAKELETVDFKDKLEETKGQINNSIKDLTDGHFENILADNSVNDQTKILVVNAAYFVGKWMKKFPESETKECPFRLNKTDTKPVQMMNMEATFCMGNIDSINCKIIELPFQNKHLSMFILLPKDVEDESTGLEKIEKQLNSESLSQWTNPSTMANAKVKLSIPKFKVEKMIDPKACLENLGLKHIFSEDTSDFSGMSETKGVALSNVIHKVCLEITEDGGDSIEVPGARILQHKDELNADHPFIYIIRHNKTRNIIFFGKFCSP

SEQ ID NO: 244 - protein, 2339 aa, Homo sapiens [sequence omitted]

SEQ ID NO: 245 - protein, 802 aa, Homo sapiens
MRLLLALLGVLLSVPGPPVLSLEASEEVELEPCLAPSLEQQEQELTVALGQPVRLCCGRAERGGHWYKEGSRLAPAGRVRGWRGRLEIASFLPEDAGRYLCLARGSMIVLQNLTLITGDSLTSSNDDEDPKSHRDPSNRHSYPQQAPYWTHPQRMEKKLHAVPAGNTVKFRCPAAGNPTPTIRWLKDGQAFHGENRIGGIRLRHQHWSLVMESVVPSDRGTYTCLVENAVGSIRYNYLLDVLERSPHRPILQAGLPANTTAVVGSDVELLCKVYSDAQPHIQWLKHIVINGSSFGADGFPYVQVLKTADINSSEVEVLYLRNVSAEDAGEYTCLAGNSIGLSYQSAWLTVLPEEDPTWTAAAPEARYTDIILYASGSLALAVLLLLAGLYRGQALHGRHPRPPATVQKLSRFPLARQFSLESGSSGKSSSSLVRGVRLSSSGPALLAGLVSLDLPLDPLWEFPRDRLVLGKPLGEGCFGQVVRAEAFGMDPARPDQASTVAVKMLKDNASDKDLADLVSEMEVMKLIGRHKNIINLLGVCTQEGPLYVIVECAAKGNLREFLRARRPPGPDLSPDGPRSSEGPLSFPVLVSCAYQVARGMQYLESRKCIHRDLAARNVLVTEDNVMKIADFGLARGVHHIDYYKKTSNGRLPVKWMAPEALFDRVYTHQSDVWSFGILLWEIFTLGGSPYPGIPVEELFSLLREGHRMDRPPHCPPELYGLMRECWHAAPSQRPTFKQLVEALDKVLLAVSEEYLDLRLTFGPYSPSGGDASSTCSSSDSVFSHDPLPLGSSSFPFGSGVQT

SEQ ID NO: 246 - protein, 157 aa, Homo sapiens
VRSSSRTPSDKPVAHVVANPQAEGQLQWLNRRANALLANGVELRDNQLVVPSEGLYLIYSQVLFKGQGCPSTHVLLTHTISRIAVSYQTKVNLLSAIKSPCQRETPRGAEAKPWYEPIYLGGVFQLEKGDRLSAEINRPDYLDFAESGQVYFGIIAL

SEQ ID NO: 247 - protein, 116 aa, Homo sapiens
MDYYRKYAAIFLVTLSVFLHVLHSAPDVQDCPECTLQENPFFSQPGAPILQCMGCCFSRAYPTPLRSKKTMLVQKNVTSESTCCVAKSYNRVTVMGGFKVENHTACHCSTCYYHKS

SEQ ID NO: 248 - protein, 675 aa, Homo sapiens
LRKHNIETYLIKQPEDSLLSLPEDIVKESVSSSDRRNSGATFTEGSWSPELPFDNIVGKQNTLAALTRNSINLLPNHLAQALHVQSGPEEINKRIEHTIDLRSGDKLRREHIKPFSLMFKDSSLEHKYSQMRDEVFKSNLVCAFIVLLFITAIQSLLPSSRVMPMTIQFSILIMLHSALVLITTAEDYKCLPLILRKTCCWINETYLARNVIIFASILINFLGAILNILWCDFDKSIPLKNLTFNSSAVFTDICSYPEYFVFTGVLAMVTCAVFLRLNSVLKLAVLLIMIAIYALLTETVYAGLFLRYDNLNHSGEDFLGTKEVSLLLMAMFLLAVFYHGQQLEYTARLDFLWRVQAKEEINEMKELREHNENMLRNILPSHVARHFLEKDRDNEELYSQSYDAVGVMFASIPGFADFYSQTEMNNQGVECLRLLNEIIADFDELLGEDRFQDIEKIKTIGSTYMAVSGLSPEKQQCEDKWGHLCALADFSLALTESIQEINKHSFNNFELRIGISHGSVVAGVIGAKKPQYDIWGKTVNLASRMDSTGVSGRIQVPEETYLILKDQGFAFDYRGEIYVKGISEQEGKIKTYFLLGRVQPNPFILPPRRLPGQYSLAAVVLGLVQSLNRQRQKQLLNENNNTGIIKGHYNRRTLLSPSGTEPGAQAEGTDKSDLP

SEQ ID NO: 249 - protein, 207 aa, Homo sapiens [sequence omitted]

SEQ ID NO: 250 - protein, 449 aa, Homo sapiens
MMKTLLLFVGLLLTWESGQVLGDQTVSDNELQEMSNQGSKYVNKEIQNAVNGVKQIKTLIEKTNEERKTLLSNLEEAKKKKEDALNETRESETKLKELPGVCNETMMALWEECKPCLKQTCMKFYARVCRSGSGLVGRQLEEFLNQSSPFYFWMNGDRIDSLLENDRQQTHMLDVMQDHFSRASSIIDELFQDRFFTREPQDTYHYLPFSLPHRRPHFFFPKSRIVRSLMPFSPYEPLNFHAMFQPFLEMIHEAQQAMDIHFHSPAFQHPPTEFIREGDDDRTVCREIRHNSTGCLRMKDQCDKCREILSVDCSTNNPSQAKLRRELDESLQVAERLTRKYNELLKSYQWKMLNTSSLLEQLNEQFNWVSRLANLTQGEDQYYLRVTTVASHTSDSDVPSGVTEVVVKLFDSDPITVTVPVEVSRKNPKFMETVAEKALQEYRKKHREE

SEQ ID NO: 251 - protein, 495 aa, Homo sapiens
MPMGSLQPLATLYLLGMLVASCLGRLSWYDPDFQARLTRSNSKCQGQLEVYLKDGWHMVCSQSWGRSSKQWEDPSQASKVCQRLNCGVPLSLGPFLVTYTPQSSIICYGQLGSFSNCSHSRNDMCHSLGLTCLEPQKTTPPTTRPPPTTTPEPTAPPRLQLVAQSGGQHCAGVVEFYSGSLGGTISYEAQDKTQDLENFLCNNLQCGSFLKHLPETEAGRAQDPGEPREHQPLPIQWKIQNSSCTSLEHCFRKIKPQKSGRVLALLCSGFQPKVQSRLVGGSSICEGTVEVRQGAQWAALCDSSSARSSLRWEEVCREQQCGSVNSYRVLDAGDPTSRGLFCPHQKLSQCHELWERNSYCKKVFVTCQDPNPAGLAAGTVASIILALVLLVVLLVVCGPLAYKKLVKKFRQKKQRQWIGPTGMNQNMSFHRNHTATVRSHAENPTASHVDNEYSQPPRNSRLSAYPALEGVLHRSSMQPDNSSDSDYDLHGAQRL

SEQ ID NO: 252 - protein, 566 aa, Homo sapiens [sequence omitted]

SEQ ID NO: 253 - protein, 603 aa, Homo sapiens [sequence omitted]

SEQ ID NO: 254 - protein, 249 aa, Homo sapiens [sequence omitted]

SEQ ID NO: 255 - protein, 264 aa, Homo sapiens [sequence omitted]

SEQ ID NO: 256 - protein, 132 aa, Homo sapiens
MAEEGIAAGGVMDVNTALQEVLKTALIHDGLARGIREAAKALDKRQAHLCVQASNCDEPMYVKLVEALLAEHQINLIKVDDNKKLGEWVGLCKIDREGNPRKVVGCSCVVVKDYGKESQAKDVIEEYFKCKK

SEQ ID NO: 257 - protein, 158 aa, Homo sapiens [sequence omitted]

SEQ ID NO: 258 - protein, 614 aa, Homo sapiens
MRPPQCLLHTPSLASPLLLLLLWLLGGGVGAEGREDAELLVTVRGGRLRGIRLKTPGGPVSAFLGIPFAEPPMGPRRFLPPEPKQPWSGVVDATTFQSVCYQYVDTLYPGFEGTEMWNPNRELSEDCLYLNVWTPYPRPTSPTPVLVWIYGGGFYSGASSLDVYDGRFLVQAERTVLVSMNYRVGAFGFLALPGSREAPGNVGLLDQRLALQWVQENVAAFGGDPTSVTLFGESAGAASVGMHLLSPPSRGLFHRAVLQSGAPNGPWATVGMGEARRRATQLAHLVGCPPGGTGGNDTELVACLRTRPAQVLVNHEWHVLPQESVFRFSFVPVVDGDFLSDTPEALINAGDFHGLQVLVGVVKDEGSYFLVYGAPGFSKDNESLISRAEFLAGVRVGVPQVSDLAAEAVVLHYTDWLHPEDPARLREALSDVVGDHNVVCPVAQLAGRLAAQGARVYAYVFEHRASTLSWPLWMGVPHGYEIEFIFGIPLDPSRNYTAEEKIFAQRLMRYWANFARTGDPNEPRDPKAPQWPPYTAGAQQYVSLDLRPLEVRRGLRAQACAFWNRFLPKLLSATDTLDEAERQWKAEFHRWSSYMVHWKNQFDHYSKQDRCSDL

SEQ ID NO: 259 - protein, 312 aa, Homo sapiens
MRMLLALLALSAARPSASAESHWCYEVQAESSNYPCLVPVKWGGNCQKDRQSPINIVTTKAKVDKKLGRFFFSGYDKKQTWTVQNNGHSVMMLLENKASISGGGLPAPYQAKQLHLHWSDLPYKGSEHSLDGEHFAMEMHIVHEKEKGTSRNVKEAQDPEDEIAVLAFLVEAGTQVNEGFQPLVEALSNIPKPEMSTTMAESSLLDLLPKEEKLRHYFRYLGSLTTPTCDEKVVWTVFREPIQLHREQILAFSQKLYYDKEQTVSMKDNVRPLQQLGQRTVIKSGAPGRPLPWALPALLGPMLACLLAGFLR

SEQ ID NO: 260 - protein, 138 aa, Homo sapiens [sequence omitted]

SEQ ID NO: 261 - protein, 1394 aa, Homo sapiens
MDTKLMCLLFFFSLPPLLVSNHTGRIKVVFTPSICKVTCTKGSCQNSCEKGNTTTLISENGHAADTLTATNFRVVICHLPCMNGGQCSSRDKCQCPPNFTGKLCQIPVHGASVPKLYQHSQQPGKALGTHVIHSTHTLPLTVTSQQGVKVKFPPNIVNIHVKHPPEASVQIHQVSRIDGPTGQKTKEAQPGQSQVSYQGLPVQKTQTIHSTYSHQQVIPHVYPVAAKTQLGRCFQETIGSQCGKALPGLSKQEDCCGTVGTSWGFNKCQKCPKKPSYHGYNQMMECLPGYKRVNNTFCQDINECQLQGVCPNGECLNTMGSYRCTCKIGFGPDPTFSSCVPDPPVISEEKGPCYRLVSSGRQCMYPLSVHLTKQLCCCSVGKAGPHCEKCPLPGTAAFKEICPGGMGYTVSGVHRRRPIHHHVGKGPVFVKPKNTQPVAKSTHPPPLPAKEEPVEALTFSREHGARSAEPEVATAPPEKEIPSLDQEKTKLEPGQPQLSPGISAIHLHPQFPVVIEKTSPPVPVEVAPEASTSSASQVIAPTQVTEINECTVNPDICGAGHCINLPVRYTCICYEGYRFSEQQRKCVDIDECTQVQHLCSQGRCENTEGSFLCICPAGFMASEEGTNCIDVDECLRPDVCGEGHCVNTVGAFRCEYCDSGYRMTQRGRCEDIDECLNPSTCPDEQCVNSPGSYQCVPCTEGFRGWNGQCLDVDECLEPNVCANGDCSNLEGSYMCSCHKGYTRTPDHKHCRDIDECQQGNLCVNGQCKNTEGSFRCTCGQGYQLSAAKDQCEDIDECQHRHLCAHGQCRNTEGSFQCVCDQGYRASGLGDHCEDINECLEDKSVCQRGDCINTAGSYDCTCPDGFQLDDNKTCQDINECEHPGLCGPQGECLNTEGSFHCVCQQGFSISADGRTCEDIDECVNNTVCDSHGFCDNTAGSFRCLCYQGFQAPQDGQGCVDVNECELLSGVCGEAFCENVEGSFLCVCADENQEYSPMTGQCRSRTSTDLDVDVDQPKEEKKECYYNLNDASLCDNVLAPNVTKQECCCTSGAGWGDNCEIFPCPVLGTAEFTEMCPKGKGFVPAGESSSEAGGENYKDADECLLFGQEICKNGFCLNTRPGYECYCKQGTYYDPVKLQCFDMDECQDPSSCIDGQCVNTEGSYNCFCTHPMVLDASEKRCIRPAESNEQIEETDVYQDLCWEHLSDEYVCSRPLVGKQTTYTECCCLYGEAWGMQCALCPLKDSDDYAQLCNIPVTGRRQPYGRDALVDFSEQYTPEADPYFIQDRFLNSFEELQAEECGILNGCENGRCVRVQEGYTCDCLDGYHLDTAKMTCFDVNECDELNNRMSLCKNAKCINTDGSYKCLCLPGYVPSDKPNYCTPLNTALNLEKDSDLE

SEQ ID NO: 262 - protein, 105 aa, Homo sapiens
MSDAAVDTSSEITTEDLKEKKEVVEEAENGRDAPAHGNANEENGEPEADNEVDEEEEEGGEEEGDGEEEDGDEDEGAESATGKRAAEDDEDDDVDTQKQKTDEDD

SEQ ID NO: 263 - protein, 165 aa, Homo sapiens [sequence omitted]

SEQ ID NO: 264 - protein, 178 aa, Homo sapiens
MAQDQGEKENPMRELRIRKLCLNICVGESGGRLTRAAKVLEQLTGQTPVFSKARYTVRSFGIRRNEKIAVHCAVRGAKAEEILEKGLKVRELELRKNNFSDTGNFGFGIQEHIDLGIEYDPSIGIYGLDFYVVLGRPGFSIADKKRRTGCIGAKHRISKEEAMRWFQQKYDGIILPGK

SEQ ID NO: 265 - protein, 450 aa, Homo sapiens; identical to SEQ ID NO: 121

SEQ ID NO: 266 - protein, 532 aa, Homo sapiens [sequence omitted]

SEQ ID NO: 267 - protein, 355 aa, Homo sapiens
MGCTVSAEDKAAAERSKMIDKNLREDGEKAAREVKLLLLGAGESGKSTIVKQMKIIHEDGYSEEECRQYRAVVYSNTIQSIMAIVKAMGNLQIDFADPSRADDARQLFALSCTAEEQGVLPDDLSGVIRRLWADHGVQACFGRSREYQLNDSAAYYLNDLERIAQSDYIPTQQDVLRTRVKTTGIVETHFTFKDLHFKMFDVGGQRSERKKWIHCFEGVTAIIFCVALSAYDLVLAEDEEMNRMHESMKLFDSICNNKWFTDTSIILFLNKKDLFEEKITHSPLTICFPEYTGANKYDEAASYIQSKFEDLNKRKDTKEIYTHFTCATDTKNVQFVFDAVTDVIIKNNLKDCGLF

SEQ ID NO: 268 - protein, 56 aa, Homo sapiens [sequence omitted]

SEQ ID NO: 269 - protein, 144 aa, Homo sapiens
MKTLLLLAVIMIFGLLQAHGNLVNFHRMIKLTTGKEAALSYGFYGCHCGVGGRGSPKDATDRCCVTHDCCYKRLEKRGCGTKFLSYKFSNSGSRITCAKQDSCRSQLCECDKAAATCFARNKTTYNKKYQYYSNKHCRGSTPRC

SEQ ID NO: 270 - protein, 196 aa, Homo sapiens [sequence omitted]

SEQ ID NO: 271 - protein, 499 aa, Homo sapiens
MAQFAFESDLHSLLQLDAPIPNAPPARWQRKAKEAAGPAPSPMRAANRSHSAGRTPGRTPGKSSSKVQTTPSKPGGDRYIPHRSAAQMEVASFLLSKENQPENSQTPTKKEHQKAWALNLNGFDVEEAKILRLSGKPQNAPEGYQNRLKVLYSQKATPGSSRKTCRYIPSLPDRILDAPEIRNDYYLNLVDWSSGNVLAVALDNSVYLWSASSGDILQLLQMEQPGEYISSVAWIKEGNYLAVGTSSAEVQLWDVQQQKRLRNMTSHSARVGSLSWNSYILSSGSRSGHIHHHDVRVAEHHVATLSGHSQEVCGLRWAPDGRHLASGGNDNLVNVWPSAPGEGGWVPLQTFTQHQGAVKAVAWCPWQSNVLATGGGTSDRHIRIWNVCSGACLSAVDAHSQVCSILWSPHYKELISGHGFAQNQLVIWKYPTMAKVAELKGHTSRVLSLTMSPDGATVASAAADETLRLWRCFELDPARRREREKASAAKSSLIHQGIR

SEQ ID NO: 272 - protein, 856 aa, Homo sapiens
MVNFTVDQIRAIMDKKANIRNMSVIAHVDHGKSTLTDSLVCKAGIIASARAGETRFTDTRKDEQERCITIKSTAISLFYELSENDLNFIKQSKDGAGFLINLIDSPGHVDFSSEVTAALRVTDGALVVVDCVSGVCVQTETVLRQAIAERIKPVLMMNKMDRALLELQLEPEELYQTFQRIVENVNVIISTYGEGESGPMGNIMIDPVLGTVGFGSGLHGWAFTLKQFAEMYVAKFAAKGEGQLGPAERAKKVEDMMKKLWGDRYFDPANGKFSKSATSPEGKKLPRTFCQLILDPIFKVFDAIMNFKKEETAKLIEKLDIKLDSEDKDKEGKPLLKAVMRRWLPAGDALLQMITIHLPSPVTAQKYRCELLYEGPPDDEAAMGIKSCDPKGPLMMYISKMVPTSDKGRFYAFGRVFSGLVSTGLKVRIMGPNYTPGKKEDLYLKPIQRTILMMGRYVEPIEDVPCGNIVGLVGVDQFLVKTGTITTFEHAHNMRVMKFSVSPVVRVAVEAKNPADLPKLVEGLKRLAKSDPMVQCIIEESGEHIIAGAGELHLEICLKDLEEDHACIPIKKSDPVVSYRETVSEESNVLCLSKSPNKHNRLYMKARPFPDGLAEDIDKGEVSARQELKQRARYLAEKYEWDVAEARKIWCFGPDGTGPNILTDITKGVQYLNEIKDSVVAGFQWATKEGALCEENMRGVRFDVHDVTLHADAIHRGGGQIIPTARRCLYASVLTAQPRLMEPIYLVEIQCPEQVVGGIYGVLNRKRGHVFEESQVAGTPMFVVKAYLPVNESFGFTADLRSNTGGQAFPQCVFDHWQILPGDPFDNSSRPSQVVAETRKRKGLKEGIPALDNFLD

SEQ ID NO: 273 - protein, 106 aa, Homo sapiens
MVNVPKTRRTFCKKCGKHQPHKVTQYKKGKDSLYAQGRRRYDRKQSGYGGQTKPIFRKKAKTTKKIVLRLECVEPNCRSKRMLAIKRCKHFELGGDKKRKGQVIQF

SEQ ID NO: 274 - protein, 69 aa, Homo sapiens
MSVLTPLLLRGLTGSARRLPVPRAKIHSLPPEGKLGIMELAVGLTSCFVTFLLPAGWILSHLETYRRPE

SEQ ID NO: 275 - protein, 292 aa, Homo sapiens
MELLCCEGTRHAPRAGPDPRLLGDQRVLQSLLRLEERYVPRASYFQCVQREIKPHMRKMLAYWMLEVCEEQRCEEEVFPLAMNYLDRYLSCVPTRKAQLQLLGAVCMLLASKLRETTPLTIEKLCIYTDHAVSPRQLRDWEVLVLGKLKWDLAAVIAHDFLAFILHRLSLPRDRQALVKKHAQTFLALCATDYTFAMYPPSMIATGSIGAAVQGLGACSMSGDELTELLAGITGTEVDCLRACQEQIEAALRESLREASQTSSSPAPKAPRGSSSQGPSQTSTPTDVTAIHL

SEQ ID NO: 276 - DNA, 1741 bp, Homo sapiens
gaattccggacaggtagtaagataggaagtgaggccaggtaccttgtgggcagtgatgtcattcggtgcgactcctaagatgtctccagagatgggagagctcacccaaaccaggttgcagaagatctggattccacacagcagcggcagcagcaggctgcaacggagaaggggctcatccataccccagtttaccaattcccccacaatggtgatcatggtgggtttaccagctcgaggcaagacctatatctccacaaagctcacacgatatctcaactggataggaacaccaactaaagtgtttaatttaggccagtatcgacgagaggcagtgagctacaagaactatgaattctttcttccagacaacatggaagccctgcaaatcaggaagcagtgcgccctggcagccctgaaggatgttcacaactatctcagccatgaggaaggtcatgttgcggtttttgatgccaccaacactaccagagaacgacggtcactgatcctgcagtttgcaaaagaacatggttacaaggtgtttttcattgagtccatttgtaatgaccctggcataattgcagaaaacatcaggcaagtgaaacttggcagccctgattatatagactgtgaccgggaaaaggttctggaagactttctaaagagaattgagtgctatgaggtcaactaccaacccttggatgaggaactggacagccacctgtcctacatcaagatcttcgacgtgggcacacgctacatggtgaaccgagtgcaggatcacatccagagccgcacagtctactacctcatgaatatccatgtcacacctcgctccatctacctttgccgacatggcgagagtgaactcaacatcagaggccgcatcggaggtgactctggcctctcagttcgcggcaagcagtatgcctatgccctggccaacttcattcagtcccagggcatcagctccctgaaggtgtggaccagtcgcatgaagaggaccatccagacagctgaggccctgggtgtcccctatgagcagtggaaggccctgaatgagattgatgcgggtgtctgtgaggagatgacctatgaagaaatccaggaacattaccctgaagaatttgcactgcgagaccaagataaatatcgctaccgctatcccaagggagagtcctatgaggatctggttcagcgtctggagccagtgataatggagctagaacgacaggagaatgtactggtgatctgccaccaggctgtcatgcggtgcctcctggcctatttcctggataaaagttcagatgagcttccatatctcaagtgccctctgcacacagtgctcaaactcactcctgtggcttatggctgcaaagtggaatccatctacctgaatgtggaggccgtgaacacacaccgggagaagcctgagaatgtggacatcacccgggaacctgaggaagccctggatactgtcccagcccactactgagccctttccaagaagtcaaactgcctgtgtcctcatcgccttccacctttaggaaatgctatctttgctcttctcctactctgccttggcctcactgaggcaccccacttccagtgaagaagtcctccgcaactcccaaacaagcctcgcttgctggccgcaaccaaggagctatctagctctggaggaaactttctttcttaattcctattctctgacgaataaagacttactgcctacaagagg

SEQ ID NO: 277 - DNA, 866 bp, Homo sapiens
atggcggagcgcgggtacagcttttcgctgactacattcagcccgtctggtaaacttgtccagattgaatatgctttggctgctgtagctggaggagccccgtccgtgggaattaaagctgcaaatggtgtggtattagcaactgagaaaaaacagaaatccattctgtatgatgagcgaagtgtacacaaagtagaaccaattaccaagcatataggtttggtgtacagtggcatgggccccgattacagagtgcttgtgcacagagctcgaaaactagctcaacaatactatcttgtgtaccaagaacccattcctacagctcagctggtacagagagtagcttctgtgatgcaagaatatactcagtcaggtggtgttcgtccatttggagtttctttacttatttgtggttggaatgagggacgaccatatttatttcagtcagatccatctggagcttactttgcctggaaagctacagcaatgggaaagaactatgtgaatgggaagactttccttgagaaaagatataatgaagatctggaacttgaagatgccattcatacagccatcttaaccctaaaggaaagctttgaagggcaaatgacagaggataacatagaagttggaatctgcaatgaagctggatttaggaggcttactccaactgaagttaaggattacttggctgccatagcataacaatgaagtgactgaaaaatccagaatttcagataatctatctacttaaacatgtttaaagtatgttttgttttgcagactttttgcatacttatttctacatggtttaaatcgactgtttttaaaatgacacttataaatcctaataaactgttaaaccc

SEQ ID NO: 278 - DNA, 1550 bp, Homo sapiens
aaaaaccagggctccagagaatcagaacagccaccatcaccgcagggagtcaagggaggagggagattagagaaggagccagggagggtggcagggaggccacgtgatccgagtcccctcacccctttccttcccacaggtccctggccaaagatttatttctcttgacaaccaagggcctccgtctggatttccaaggaagaatttcctctgaagcaccggaacttgctactaccagcaccatgccctaccaatatccagcactgaccccggagcagaagaaggagctgtctgacatcgctcaccgcatcgtggcacctggcaagggcatcctggctgcagatgagtccactgggagcattgccaagcggctgcagtccattggcaccgagaacaccgaggagaaccggcgcttctaccgccagctgctgctgacagctgacgaccgcgtgaacccctgcattgggggtgtcatcctcttccatgagacactctaccagaaggcggatgatgggcgtcccttcccccaagttatcaaatccaagggcggtgttgtgggcatcaaggtagacaagggcgtggtccccctggcagggacaaatggcgagactaccacccaagggttggatgggctgtctgagcgctgtgcccagtacaagaaggacggagctgacttcgccaagtggcgttgtgtgctgaagattggggaacacaccccctcagccctcgccatcatggaaaatgccaatgttctggcccgttatgccagtatctgccagcaggtgggcctgcagaatggcattgtgcccatcgtggagcctgagatcctccctgatggggaccatgacttgaagcgctgccagtatgtgaccgagaaggtgctggctgctgtctacaaggctctgagtgaccaccacatctacctggaaggcaccttgctgaagcccaacatggtcaccccaggccatgcttgcactcagaagttttctcatgaggagattgccatggcgaccgtcacagcgctgcgccgcacagtgccccccgctgtcactgggatcaccttcctgtctggaggccagagtgaggaggaggcgtccatcaacctcaatgccattaacaagtgccccctgctgaagccctgggccctgaccttctcctacggccgagccctgcaggcctctgccctgaaggcctggggcgggaagaaggagaacctgaaggctgcgcaggaggagtatgtcaagcgagccctggccaacagccttgcctgtcaaggaaagtacactccgagcggtcaggctggggctgctgccagcgagtccctcttcgtctctaaccacgcctattaagcggaggtgttcccaggctgcccccaacactccaggccctgccccctcccactcttgaagaggaggccgcctcctcggggctccaggctggcttgcccgcgctctttcttccctcgtgacagtggtgtgtggtgtcgtctgtgaatgctaagtccatcaccctttccggcacactgccaaataaacagctatttaaggggg

SEQ ID NO: 279 - DNA, 631 bp, Homo sapiens
ggggaagctgagggctgagaccaagggctaaagctgggaggtgagtctgtcaccttgagccgggcgagcgctgtgggccaagcaggggttgcagggcagtaggagtgcagactgaaaaaatgcagaccgccggggcattattcatttctccagctctgatccgctgttgtaccaggggtctaatcaggcctgtgtctgcctccttcttgaatagcccagtgaattcatctaaacagccttcctacagcaacttcccactccaggtggccagacgggagttccagaccagtgttgtctcccgggacattgacacagcagccaagtttattggtgctggggcagccacagttggtgtggctggttcaggggctggcattggaaccgtgtttggcagcttgatcattggctatgccaggaacccgtctctcaagcagcagctcttctcctatgccattcttggctttgccctgtctgaggccatggggcttttctgtttgatggtcgccttcctcatcctcttcgccatgtgaggctccatggggggtcaccggcctgttgctactgcaactccacaccattcttggtgctggggtgtgttaagctttaccattaaacacaacgtttctctaaa

SEQ ID NO: 280 - DNA, 1404 bp, Homo sapiens
acctccacgtgccctgtttttctggaggcacatccttggcctcttccacagtccttgggtaaatgcttgggagaataatttaaatatttttattctaccatggtggccctaatttttcagggggcagtaagatatgaatcctacactcatccttgctgccttttgcctgggaattgcctcagctactctaacatttgatcacagtttagaggcacagtggaccaagtggaaggcgatgcacaacagattatacggcatgaatgaagaaggatggaggagagcagtgtgggagaagaacatgaagatgattgaactgcacaatcaggaatacagggaagggaaacacagcttcacaatggccatgaacgcctttggagacatgaccagtgaagaattcaggcaggtgatgaatggctttcaaaaccgtaagcccaggaaggggaaagtgttccaggaacctctgttttatgaggcccccagatctgtggattggagagagaaaggctacgtgactcctgtgaagaatcagggtcagtgtggttcttgttgggcttttagtgctactggtgctcttgaaggacagatgttccggaaaactgggaggcttatctcactgagtgagcagaatctggtagactgctctgggcctcaaggcaatgaaggctgcaatggtggcctaatggattatgctttccagtatgttcaggataatggaggcctggactctgaggaatcctatccatatgaggcaacagaagaatcctgtaagtacaatcccaagtattctgttgctaatgacaccggctttgtggacatccctaagcaggagaaggccctgatgaaggcagttgcaactgtggggcccatttctgttgctattgatgcaggtcatgagtccttcctgttctataaagaaggcatttattttgagccagactgtagcagtgaagacatggatcatggtgtgctggtggttggctacggatttgaaagcacagaatcagataacaataaatattggctggtgaagaacagctggggtgaagaatggggcatgggtggctacgtaaagatggccaaagaccggagaaaccattgtggaattgcctcagcagccagctaccccactgtgtgagctgtggacggtgatgaggaaggacttgactggggatggcgcatgcatgggaggaattcttcagtctaccagcccccgctgtgtcggatacacactcgaatcattgaagatccgagtgtgatttgaattctgtgatattttcacactggtaaatgttacctctattttaattactgctataaataggtttatattattgattcacttactgactttgcattttcgtttttaaaaggatgtataaatttttacctgtttaaataaaatcg

SEQ ID NO: 281 - DNA, 1956 bp, Homo sapiens
gaagaacttctgcttgggtggctgaactctgatcttgacctagagtcatggccatggcaaccaaaggaggtactgtcaaagctgcttcaggattcaatgccatggaagatgcccagaccctgaggaaggccatgaaagggctcggcaccgatgaagacgccattattagcgtccttgcctaccgcaacaccgcccagcgccaggagatcaggacagcctacaagagcaccatcggcagggacttgatagacgacctgaagtcagaactgagtggcaacttcgagcaggtgattgtggggatgatgacgcccacggtgctgtatgacgtgcaagagctgcgaagggccatgaagggagccggcactgatgagggctgcctaattgagatcctggcctcccggacccctgaggagatccggcgcataagccaaacctaccagcagcaatatggacggagccttgaagatgacattcgctctgacacatcgttcatgttccagcgagtgctggtgtctctgtcagctggtgggagggatgaaggaaattatctggacgatgctctcgtgagacaggatgcccaggacctgtatgaggctggagagaagaaatgggggacagatgaggtgaaatttctaactgttctctgttcccggaaccgaaatcacctgttgcatggtttgatgaatacaaaaggatatcacagaaggatattgaacagagtattaaatctgaaacatctggtagctttgaagatgctctgctggctatagtaaagtgcatgaggaacaaatctgcatattttgctgaaaagctctataaatcgatgaagggcttgggcaccgatgataacaccctcatcagagtgatggtttctcgagcagaaattgacatgttggatatccgggcacacttcaagagactctatggaaagtctctgtactcgttcatcaagggtgacacatctggagactacaggaaagtactgcttgttctctgtggaggagatgattaaaataaaaatcccagaaggacaggaggattctcaacactttgaatttttttaacttcatttttctacactgctattatcattatctcagaatgcttatttccaattaaaacgcctacagctgcctcctagaatatagactgtctgtattattattcacctataattagtcattatgatgctttaaagctgtacttgcatttcaaagcttataagatataaatggagattttaaagtagaaataaatatgtattccatgtttttaaaagattactttctactttgtgtttcacagacattgaatatattaaattattccatattttcttttcagtgaaaaattttttaaatggaagactgttctaaaatcacttttttccctaatccaatttttagagtggctagtagtttcttcatttgaaattgtaagcatccggtcagtaagaatgcccatccagttttctatatttcatagtcaaagccttgaaagcatctacaaatctctttttttaggttttgtccatagcatcagttgatccttactaagtttttcatgggagacttccttcatcacatcttatgttgaaatcactttctgtagtcaaagtataccaaaaccaatttatctgaactaaattctaaagtatggttatacaaaccatatacatctggttaccaaacataaatgctgaacattccatattattatagttaatgtcttaatccagcttgcaagtgaatggaaaaaaaaataagcttcaaactaggtattctgggaatgatgtaatgctctgaatttagtatgatataaagaaaacttttttgtgctaaaaatactttttaaaatcaattttgttgattgtagtaatttctatttgcactgtgcctttcaactccagaaacattctgaagatgtacttggatttaattaaaaagttcactttgt

SEQ ID NO: 282 - DNA, 743 bp, Homo sapiens
cagccagctcgacggggctgtgtgtgctgggcctggctcgcggcgaaccgagatggcagagcagtcggacgaggccgtgaagtactacaccctagaggagattcagaagcacaaccacagcaagagcacctggctgatcctgcaccacaaggtgtacgatttgaccaaatttctggaagagcatcctggtggggaagaagttttaagggaacaagctggaggtgacgctactgagaactttgaggatgtcgggcactctacagatgccagggaaatgtccaaaacattcatcattggggagctccatccagatgacagaccaaagttaaacaagcctccggaaactcttatcactactattgattctagttccagttggtggaccaactgggtgatccctgccatctctgcagtggccgtcgccttgatgtatcgcctatacatggcagaggactgaacacctcctcagaagtcagcgcaggccgagcctgctttggacacgggagaaaagaagccattgctaactacttcaactgacagaaaccttcacttgaaaacaatgattttaatatatctctttctttttcttccgacattagaaacaaaacaaaaagaactgtcctttctgcgctcaaatttttcgagtgtgcctttttattcatctactttattttgatgtttccttaatgtgtaatttacttattataagcatgatcttttaaaaatatatttggcttttaaag

SEQ ID NO: 283 - DNA, 1510 bp, Homo sapiens
acccctaagatgagctttccatgtaaatttgtagccagcttccttctgattttcaatgtttcttccaaaggtgcagtctccaaagagattacgaatgccttggaaacctggggtgccttgggtcaggacatcaacttggacattcctagttttcaaatgagtgatgatattgacgatataaaatgggaaaaaacttcagacaagaaaaagattgcacaattcagaaaagagaaagagactttcaaggaaaaagatacatataagctatttaaaaatggaactctgaaaattaagcatctgaagaccgatgatcaggatatctacaaggtatcaatatatgatacaaaaggaaaaaatgtgttggaaaaaatatttgatttgaagattcaagagagggtctcaaaaccaaagatctcctggacttgtatcaacacaaccctgacctgtgaggtaatgaatggaactgaccccgaattaaacctgtatcaagatgggaaacatctaaaactttctcagagggtcatcacacacaagtggaccaccagcctgagtgcaaaattcaagtgcacagcagggaacaaagtcagcaaggaatccagtgtcgagcctgtcagctgtccagagaaaggtctggacatctatctcatcattggcatatgtggaggaggcagcctcttgatggtctttgtggcactgctcgttttctatatcaccaaaaggaaaaaacagaggagtcggagaaatgatgaggagctggagacaagagcccacagagtagctactgaagaaaggggccggaagccccaccaaattccagcttcaacccctcagaatccagcaacttcccaacatcctcctccaccacctggtcatcgttcccaggcacctagtcatcgtcccccgcctcctggacaccgtgttcagcaccagcctcagaagaggcctcctgctccgtcgggcacacaagttcaccagcagaaaggcccgcccctccccagacctcgagttcagccaaaacctccccatggggcagcagaaaactcattgtccccttcctctaattaaaaaagatagaaactgtatttttcaataaaaagcactgtggatttctgccctcctgatgtgcatatccgtacttccatgaggtgttttctgtgtgcagaacattgtcacctcctgaggctgtgggccacagccacctctgcatcttcgaactcagccatgtggtcaacatctggagtttttggtctcctcagagagctccatcacaccagtaaggagaagcaatataagtgtgattgcaagaatggtagaggaccgagcacagaaatcttagagatttcctgtcccctctcaggtcatgtgtagatgcgataaatcaagtgattggtgtgcctgggtctcactacaagcagcctatctgcttaagagactctggagtttcttatgtgccctggtggacacttgcccaccatcctgtgagtaaaagtgaaataaaagctttgactag

SEQ ID NO: 284 - DNA, 702 bp, Homo sapiens
gagttccatgccacctccccgccctttacagacatgctataaggtccccagcccagtcactccgcagtgcctctctcttcctccccatggactatacacaggccctgcttgtcctggaggaaagtttggacgtcattatatagatcaggagactgaagtactgaaaggttaaatgacttgccaaagaatgagatctttttttctaacattttacataatatcctcagagaagatcacgccctggtgactagagctgtggccatgaaggtggaaaatttcaaaacaagtgaaatacaggaactctttgacatatttacttacagcaagggagcgtctatggcccggatgctttcttgtttcttgaatgagcatttatttgtcagtgcactcaagtcatatttgaagacattttcctactcaaacgctgagcaagatgatctatggaggcattttcaaatggccatagatgaccagagtacagttattttgccagcaacaataaaaaacataatggacagttggacacaccagagtggttttccagtgatcactttaaatgtgtctactggcgtcatgaaacaggagccattttatcttgaaaacattaaaaatcggactcttctaaccagcaataagtgacacatggattgtccctattctttggataaaaaatggaactacacaacctttagtctggctaga

SEQ ID NO: 285 - DNA, 1335 bp, Homo sapiens
atgtcaacagcaccaattaaacatgaaggtttcctcactaaagaaggtggtggtttcaaaagttggaaaaagagatggttcattctcaaaggtggtgatttaagttattataaaacaaaaggtgaacttgtaccattaggagttattcatttaaatacatcaggtcatattaaaaattctgatcgtaagaaaagagttaatggatttgaagtacaaacaccatcacgtacatatttcttatgttcagagacagaggaagaacgtgcaaaatggatagagatattaattaatgaaagagaattattattgaatggtggtaaacaaccaaagaaatcggaaaaggtaggagttgcagattttgaattattgaatttagttggtaaaggtagttttggtaaagttattcaagttagaaagaaagatactggtgaagtgtatgcaatgaaagttttatcaaagaaacatatcgtagagcataacgaagtcgaacatacattgagtgagcgtaatattcttcaaaagatcaatcacccatttttggttaatctcaactacagttttcaaacagaggataagctttactttatcttggattatgttaatggtggtgagttattctatcatcttcaaaaggacaaaaagtttacagaggatcgtgtccgttattatggcgcagagatcgtattggcattggaacatttacatttgtcgggtgtcatctatagagatttgaaaccagagaatttactactcaccaacgagggtcacatttgcatgaccgatttcggtctttgcaaagagggtctattgacaccaaccgacaaaactggtactttctgtggtactcctgaatatttagcacccgaagtacttcaaggcaatggttatggtaaacaagtggattggtggagttttggttctctcctctatgaaatgctcactggtttaccaccattctacaatcaagacgtccaagagatgtatcgtaagatcatgatggagaaattatctttcccacatttcatttctccagatgctcgttccctcttggaacaactcttggaaagagatcctgaaaaaagacttgccgatccaaatcttattaaaagacatcctttcttccgttccatcgattgggaacaattattccaaaagaatattccaccaccattcattccaaatgttaaaggttctgctgatacctctcaaattgatccagttttcactgatgaagctccttctttaactatggctggtgaatgtgctttaaatccgcaacaacaaaaagattttgaaggatttacatatgtcgctgaatctgaacatttaagataa

SEQ ID NO: 286 - DNA, 1755 bp, Homo sapiens
gagttgccacagctcttctactccactgctgtctatcttgcctgccggcacccagccaccatgtgggagctcgtggctctcttgctgcttaccctagcttatttgttttggcccaagagaaggtgccctggtgccaagtaccccaagagcctcctgtccctgcccctggtgggcagcctgccattcctccccagacatggccatatgcataacaacttcttcaagctgcagaaaaaatatggccccatctattctgttcgtatgggcaccaagactacagtgattgtcggccaccaccagctggccaaggaggtgcttattaagaagggcaaggacttctctgggcggcctcaaatggcaactctagacatcgcgtccaacaaccgtaagggtatcgccttcgctgactctggcgcacactggcagctgcatcgaaggctggcgatggccacctttgccctgttcaaggatggcgatcagaagctggagaagatcatttgtcaggaaatcagtacattgtgtgatatgctggccacccacaacggacagtccatagacatctcctttcctgtcttcgtggcggtaaccaatgtcatctccttgatctgcttcaatacctcctacaagaatggggaccctgagttgaatgtcatacagaattacaatgaaggcatcatagacaacctgagcaaagacagcctggtggacctagtcccctggttgaagattttccccaacaaaaccctggaaaaattaaagagccatgttaaaatacgaaatgatctgctgaataaaatacttgaaaattacaaggagaaattccggagtgactctatcaccaacatgctggacacactgatgcaagccaagatgaactcagataatggcaatgctggcccagatcaagattcagagctgctttcagataaccacattctcaccaccataggggacatctttggggctggcgtggagaccaccacctctgtggttaaatggaccctggccttcctgctgcacaatcctcaggtgaagaagaagctctacgaggagattgaccagaatgtgggtttcagccgcacaccaactatcagtgaccgtaaccgtctcctcctgctggaggccaccatccgagaggtgcttcgcctcaggcccgtggcccctatgctcatcccccacaaggccaacgttgactccagcatcggtgagtttgctgtggacaagggcacagaagttatcatcaatctgtgggcgctgcatcacaatgagaaggagtggcaccagccggatcagttcatgcctgagcgtttcttgaatccagcggggacccagctcatctcaccgtcagtaagctatttgcccttcggagcaggacctcgctcctgtataggtgagatcctggcccgccaggagctcttcctcatcatggcctggctgctgcagaggttcgacctggaggtgccagatgatgggcagctgccctccctggaaggcatccccaaggtggtctttctgatcgactctttcaaagtgaagatcaaggtgcgccaggcctggagggaagcccaggctgagggtagcacctaaaggctgtaactcacagcccctgtccaccctatgtggccccacaacacagatttagagatacaaccccccacccttctccgccattcttccctactcccaacccactctgccttctttttcagcttgtggcaatgccagtgatgtgcataaacagttttttttttttcc

SEQ ID NO: 287 - DNA, 978 bp, Homo sapiens
ccgcgtcggtgcccgcgcccctccccgggccccgccatgggcctcaccgtgtccgcgctcttttcgcggatcttcgggaagaagcagatgcggattctcatggttggcttggatgcggctggcaagaccacaatcctgtacaaactgaagttgggggagattgtcaccaccatcccaaccataggcttcaatgtagaaacagtggaatataagaacatctgtttcacagtctgggacgtgggaggccaggacaagattcggcctctgtggcggcactacttccagaacactcagggcctcatctttgtggtggacagtaatgaccgggagcgggtccaagaatctgctgatgaactccagaagatgctgcaggaggacgagctgcgggatgcagtgctgctggtatttgccaacaagcaggacatgcccaacgccatgcccgtgagcgagctgactgacaagctggggctacagcacttacgcagccgcacgtggtatgtccaggccacctgtgccacccaaggcacaggtctgtacgatggtctggactggctgtcccacgagctgtcaaagcgctaaccagccaggggcaggcccctgatgcccggaagctcctgcgtgcatccccgggatgaccagactcccggactcctcaggcagtgccctttcctcccacttttcctcccccatagccacaggcctctgctcctgctcctgcctgcatgttctctctgttgttggagcctggagccttgctctctgggcacagaggggtccactctcctgcctgctgggacctatggaaggggcttcctggccaaggccccctcttccagaggaggagcagggatctgggtttccttttttttttctgttttgggtgtactctaggggccaggttgggagggggaaggtgagggcttcgggtggtgctataatgtggcactggatcttgagtaataaatttgctgtggtttg

SEQ ID NO: 288 - DNA, 924 bp, Homo sapiens
agtccctgcattgcgcgcgacccggcggcgggacaggcttgctgcttcctcctcctcggcctcaccattccagaccaaaattgaaaaaatggttgacctcacccaggtaatggatgatgaagtattcatggcttttgcatcctatgcaacaattattctttcaaaaatgatgcttatgagtactgcaactgcattctatagattgacaagaaaggtttttgccaatccagaagactgtgtagcatttggcaaaggagaaaatgccaagaagtatcttcgaacagatgacagagtagaacgtgtacgcagagcccacctgaatgaccttgaaaatattattccatttcttggaattggcctcctgtattccttgagtggtcccgacccctctacagccatcctgcacttcagactatttgtcggagcacggatctaccacaccattgcatatttgacaccccttccccagccaaatagagctttgagtttttttgttggatatggagttactctttccatggcttacaggttgctgaaaagtaaattgtacctgtaaagaaaatcatacaactcagcatccagttggctttttaagaattctgtacttccaatttataatgaatactttcttagattttaggtaggaggggagcagaggaattatgaactggggtaaacccattttgaatattagcattgccaatatcctgtattcttgttttacatttggattagaaatttaacatagtaattcttaagtcttttgtctgatttttaaagtactttcttataaatttggatcatgttatgatttgtaacattcacacaacacctcacttttgaatctataaaagaattgcacgtatgagaaacctatatttcaatactgctgaaacagacatgaaataaagaatttaaagaatg

SEQ ID NO: 289 - DNA, 965 bp, Homo sapiens
gaattcaaaaaaaaaagaaaaaaaaaaaaaaaaaaaaaaaaaaaaaagagagactgcgagaaggaggtcccccacggcccttcaggatgaaagctgcggtgctgaccttggccgtgctcttcctgacggggagccaggctcggcatttctggcagcaagatgaacccccccagagcccctgggatcgagtgaaggacctggccactgtgtacgtggatgtgctcaaagacagcggcagagactatgtgtcccagtttgaaggctccgccttgggaaaacagctaaacctaaagctccttgacaactgggacagcgtgacctccaccttcagcaagctgcgcgaacagctcggccctgtgacccaggagttctgggataacctggaaaaggagacagagggcctgaggcaggagatgagcaaggatctggaggaggtgaaggccaaggtgcagccctacctggacgacttccagaagaagtggcaggaggagatggagctctaccgccagaaggtggagccgctgcgcgcagagctccaagagggcgcgcgccagaagctgcacgagctgcaagagaagctgagcccactgggcgaggagatgcgcgaccgcgcgcgcgcccatgtggacgcgctgcgcacgcatctggccccctacagcgacgagctgcgccagcgcttggccgcgcgccttgaggctctcaaggagaacggcggcgccagactggccgagtaccacgccaaggccaccgagcatctgagcacgctcagcgagaaggccaagcccgcgctcgaggacctccgccaaggcctgctgcccgtgctggagagcttcaaggtcagcttcctgagcgctctcgaggagtacactaagaagctcaacacccagtgaggcgcccgccgccgccccccttcccggtgctcagaataaacgtttccaaagtgggaaaaaaaaaaaaaagaattc

SEQ ID NO: 290 - DNA, 2764 bp, Homo sapiens
tgggacaggcagctccggggtccgcggtttcacatcggaaacaaaacagcggctggtctggaaggaacctgagctacgagccgcggcggcagcggggcggcggggaagcgtatacctaatctgggagcctgcaagtgacaacagcctttgcggtccttagacagcttggcctggaggagaacacatgaaagaaagaacctcaagaggctttgttttctgtgaaacagtatttctatacagttgctccaatgacagagttacctgcaccgttgtcctacttccagaatgcacagatgtctgaggacaaccacctgagcaatactgtacgtagccagaatgacaatagagaacggcaggagcacaacgacagacggagccttggccaccctgagccattatctaatggacgaccccagggtaactcccggcaggtggtggagcaagatgaggaagaagatgaggagctgacattgaaatatggcgccaagcatgtgatcatgctctttgtccctgtgactctctgcatggtggtggtcgtggctaccattaagtcagtcagcttttatacccggaaggatgggcagctaatctataccccattcacagaagataccgagactgtgggccagagagccctgcactcaattctgaatgctgccatcatgatcagtgtcattgttgtcatgactatcctcctggtggttctgtataaatacaggtgctataaggtcatccatgcctggcttattatatcatctctattgttgctgttctttttttcattcatttacttgggggaagtgtttaaaacctataacgttgctgtggactacattactgttgcactcctgatctggaattttggtgtggtgggaatgatttccattcactggaaaggtccacttcgactccagcaggcatatctcattatgattagtgccctcatggccctggtgtttatcaagtacctccctgaatggactgcgtggctcatcttggctgtgatttcagtatatgatttagtggctgttttgtgtccgaaaggtccacttcgtatgctggttgaaacagctcaggagagaaatgaaacgctttttccagctctcatttactcctcaacaatggtgtggttggtgaatatggcagaaggagacccggaagctcaaaggagagtatccaaaaattccaagtataatgcagaaagcacagaaagggagtcacaagacactgttgcagagaatgatgatggcgggttcagtgaggaatgggaagcccagagggacagtcatctagggcctcatcgctctacacctgagtcacgagctgctgtccaggaactttccagcagtatcctcgctggtgaagacccagaggaaaggggagtaaaacttggattgggagatttcattttctacagtgttctggttggtaaagcctcagcaacagccagtggagactggaacacaaccatagcctgtttcgtagccatattaattggtttgtgccttacattattactccttgccattttcaagaaagcattgccagctcttccaatctccatcacctttgggcttgttttctactttgccacagattatcttgtacagccttttatggaccaattagcattccatcaattttatatctagcatatttgcggttagaatcccatggatgtttcttctttgactataacaaaatctggggaggacaaaggtgattttcctgtgtccacatctaacaaagtcaagattcccggctggacttttgcagcttccttccaagtcttcctgaccaccttgcactattggactttggaaggaggtgcctatagaaaacgattttgaacatacttcatcgcagtggactgtgtccctcggtgcagaaactaccagatttgagggacgaggtcaaggagatatgataggcccggaagttgctgtgccccatcagcagcttgacgcgtggtcacaggacgatttcactgacactgcgaactctcaggactaccgttaccaagaggttaggtgaagtggtttaaaccaaacggaactcttcatcttaaactacacgttgaaaatcaacccaataattctgtattaactgaattctgaacttttcaggaggtactgtgaggaagagcaggcaccagcagcagaatggggaatggagaggtgggcaggggttccagcttccctttgattttttgctgcagactcatcctttttaaatgagacttgttttcccctctctttgagtcaagtcaaatatgtagattgcctttggcaattcttcttctcaagcactgacactcattaccgtctgtgattgccatttcttcccaaggccagtctgaacctgaggttgctttatcctaaaagttttaacctcaggttccaaattcagtaaattttggaaacagtacagctatttctcatcaattctctatcatgttgaagtcaaatttggattttccaccaaattctgaatttgtagacatacttgtacgctcacttgccccagatgcctcctctgtcctcattcttctctcccacacaagcagtctttttctacagccagtaaggcagctctgtcgtggtagcagatggtcccattattctagggtcttactctttgtatgatgaaaagaatgtgttatgaatcggtgctgtcagccctgctgtcagaccttcttccacagcaaatgagatgtatgcccaaagacggtagaattaaagaagagtaaaatggctgttgaagc

SEQ ID NO: 291 - DNA, 2603 bp, Homo sapiens
gtggacccgttcaccgactacggctcctcgctcaccgtcacgctgccgcccgagctgcaggcgcaccagcccttccaggtcatcctgcggtacacctcgaccgacgcccccgccatctggtggctggacccagagctgacctatggctgcgccaagcccttcgtcttcacccagggccactccgtgtgcaaccgctccttcttcccgtgcttcgacacacctgccgtgaagtgcacctactctgccgtcgtcaaggcgccatcgggggtgcaggtgctgatgagtgccacccggagtgcatacatggaggaagaaggcgtcttccacttccacatggagcaccccgtgcccgcctacctcgtggccctggtggccggagacctcaagccggcagacatcgggcccaggagccgcgtgtgggccgagccatgcctcctgcccacggccaccagcaagctgtcgggcgcagtggagcagtggctgagtgcagctgagcggctgtatgggccctacatgtggggcaggtacgacattgtcttcctgccaccctccttccccatcgtggccatggagaacccctgcctcaccttcatcatctcctccatcctggagagcgatgagttcctggtcatcgatgtcatccacgaggtggcccacagttggttcggcaacgctgtcaccaacgccacgtgggaagagatgtggctgagcgagggcctggccacctatgcccagcgccgtatcaccaccgagacctacggtgctgccttcacctgcctggagactgccttccgcctggacgccctgcaccggcagatgaagcttctgggagaggacagcccggtcagcaaactgcaggtcaagctggagccaggagtgaatcccagccacctgatgaacctgttcacctacgagaagggctactgcttcgtgtactacctgtcccagctctgcggagacccacagcgctttgatgactttctccgagcctatgtggagaagtacaagttcaccagcgtggtggcccaggacctgctggactccttcctgagcttcttcccggagctgaaggagcagagcgtggactgccgggcagggctggaattcgagcgctggctcaatgccacaggcccgccgctggctgagccggacctgtctcagggatccagcctgacccggcccgtggaggcccttttccagctgtggaccgcagaacctctggaccaggcagctgcctcggccagcgccattgacatctccaagtggaggaccttccagacagcactcttcctggaccggctcctggatgggtccccgctgccgcaggaggtggtgatgagcctgtccaagtgctactcctccctgctggactcgatgaacgctgagatccgcatccgctggctgcagattgaggtccgcaacgactactatcctgacctccacagggtgcggcgcttcctggagagccagatgtcacgcatgtacaccatcccgctgtacgaggacctctgcaccggtgccctcaagtccttcgcgctggaggtcttctaccagacgcagggccggctgcaccccaacctgcgcagagccatccagcagatcctgtcccagggcctgggctccagcacagagcccgcctcagagcccagcacggagctgggcaaggctgaagcagacacagactcggacgcacaggccctgctgcttggggacgaggcccccagcagtgccatctctctcagggacgtcaatgtgtctgcctagccctgttggcgggctgaccctcgacctcccagacaccacaattgtgccttctgtgggccaggcctgccatgactgcgtctcggctctggccatgagctctgcccaggcccacaagcccctcccctgggctctcccaggcagggagaatggggagagggacctccttgtgtctggcagagacctgtggacctggcctccccactcccagctctcttgcactgcaggccctggggccagcccgcacacaccatgcctcctgtctcaacactgacagctgtgcctagccccggatgccagcacctgccaggtgccgccccggggcaagggccccagcagccctatggtgaccgccacactgtgccttaatgtctgccgggggcccaggctgtgctgtccctgcagcacgcctccttgcagggatctgagccaccctccccgcacagccctgcaccccgcccctagggttggcagcctcagttggcccctggcagaggaacaaggacacagacattccctcagtgtggggggcaggggacacagggagaggatggttgtccctggggagggccctctggccccaggcaaccttagcccctcagaacagggagtcccaggacccagggagagtgtggggacaggacagcctgtctcttgtagcttcctggggtgggaggcacaggggcaaagcaataccccagggaaagtgggaggtggtgctggtgctctctccaggcccaccatgctgggagaggcggccagagcctggggcctccagcctgggactgctgtgatggggtatcacggtgatggtcccattaaacttccactctgcaaacctg

SEQ ID NO: 292 - DNA, 2403 bp, Homo sapiens
ggagactcccacgtggacaccagctccaccgtgtccgaggcggtggccgaagaagtatctcttttcagcatgacggacatgattctgttttcgctcatcgtgggtctcctaacctactggttcctcttcagaaagaaaaaagaagaagtccccgagttcaccaaaattcagacattgacctcctctgtcagagagagcagctttgtggaaaagatgaagaaaacggggaggaacatcatcgtgttctacggctcccagacggggactgcagaggagtttgccaaccgcctgtccaaggacgcccaccgctacgggatgcgaggcatgtcagcggaccctgaggagtatgacctggccgacctgagcagcctgccagagatcgacaacgccctggtggttttctgcatggccacctacggtgagggagaccccaccgacaatgcccaggacttctacgactggctgcaggagacagacgtggatctctctggggtcaagttcgcggtgtttggtcttgggaacaagacctacgagcacttcaatgccatgggcaagtacgtggacaagcggctggagcagctcggcgcccagcgcatctttgagctggggttgggcgacgacgatgggaacttggaggaggacttcatcacctggcgagagcagttctggccggccgtgtgtgaacactttggggtggaagccactggcgaggagtccagcattcgccagtacgagcttgtggtccacaccgacatagatgcggccaaggtgtacatgggggagatgggccggctgaagagctacgagaaccagaagcccccctttgatgccaagaatccgttcctggctgcagtcaccaccaaccggaagctgaaccagggaaccgagcgccacctcatgcacctggaattggacatctcggactccaaaatcaggtatgaatctggggaccacgtggctgtgtacccagccaacgactctgctctcgtcaaccagctgggcaaaatcctgggtgccgacctggacgtcgtcatgtccctgaacaacctggatgaggagtccaacaagaagcacccattcccgtgccctacgtcctaccgcacggccctcacctactacctggacatcaccaacccgccgcgtaccaacgtgctgtacgagctggcgcagtacgcctcggagccctcggagcaggagctgctgcgcaagatggcctcctcctccggcgagggcaaggagctgtacctgagctgggtggtggaggcccggaggcacatcctggccatcctgcaggactgcccgtccctgcggccccccatcgaccacctgtgtgagctgctgccgcgcctgcaggcccgctactactccatcgcctcatcctccaaggtccaccccaactctgtgcacatctgtgcggtggttgtggagtacgagaccaaggccggccgcatcaacaagggcgtggccaccaactggctgcgggccaaggagcctgtcggggagaacggcggccgtgcgctggtgcccatgttcgtgcgcaagtcccagttacgcctgcccttcaaggccaccacgcctgtcatcatggtgggccccggcaccgggtggcaccctttcataggcttcatccaggagcgggcctggctgcgacagcagggcaaggaggtgggggagacgctgctgtactacggctgccgccgctcggatgaggactacctgtaccgggaggagctggcgcagttccacagggacggtgcgctcacccagctcaacgtggccttctcccgggagcagtcccacaaggtctacgtccagcacctgctaaagcaagaccgagagcacctgtggaagttgatcgaaggcggtgcccacatctacgtctgtggggatgcacggaacatggccagggatgtgcagaacaccttctacgacatcgtggctgagctcggggccatggagcacgcgcaggcggtggactacatcaagaaactgatgaccaagggccgctactccctggacgtgtggagctaggggcctgcctgccccacccaccccacagactccggcctgtaatcagctctcctggctccctcccgtagtctcctgggtgtgtttggcttggccttggcatgggcgcaggcccagtgacaaagactcctctgggcctggggtgcatcctcctcagcccccaggccaggtgaggtccaccggcccctggcagcacagcccagggcctgcatgggggcaccgggctccatgcctctggagcctctggccctcggtggctgcacagaagggctctttctctctgctgagctggcccagcccctccacgtgatttccagtgagtgtaaataattttaaataacctctggcccttggaataaagttctgttttctgta

SEQ ID NO: 293 - DNA, 2104 bp, Homo sapiens
tgccgccgcgacccttggcgcctgcccctgcaacgggagccccactgcaggccccaccatggcgccgttcctgcgcatcgccttcaactcctatgagctgggctccctgcaggccgaggacgaggcgaaccagcccttctgtgccgtgaagatgaaggaggcgctcagcacagagcgtgggaaaacactggtgcagaagaagccgaccatgtatcctgagtggaagtcgacgttcgatgcccacatctatgaggggcgcgtcatccagattgtgctaatgcgggcagcagaggagccagtgtctgaggtgaccgtgggtgtgtcggtgctggccgagcgctgcaagaagaacaatggcaaggctgagttctggctggacctgcagcctcaggccaaggtgttgatgtctgttcagtatttcctggaggacgtggattgcaaacaatctatgcgcagtgaggacgaggccaagttcccaacgatgaaccgccgcggagccatcaaacaggccaaaatccactacatcaagaaccatgagtttatcgccaccttctttgggcaacccaccttctgttctgtgtgcaaagactttgtctggggcctcaacaagcaaggctacaaatgcaggcaatgtaacgctgccatccacaagaaatgcatcgacaagatcatcggcagatgcactggcaccgcggccaacagccgggacactatattccagaaagaacgcttcaacatcgacatgccgcaccgcttcaaggttcacaactacatgagccccaccttctgtgaccactgcggcagcctgctctggggactggtgaagcagggattaaagtgtgaagactgcggcatgaatgtgcaccataaatgccgggagaaggtggccaacctctgcggcatcaaccagaagcttttggctgaggccttgaaccaagtcacccagagagcctcccggagatcagactcagcctcctcagagcctgttgggatatatcagggtttcgagaagaagaccggagttgctggggaggacatgcaagacaacagtgggacctacggcaagatctgggagggcagcagcaagtgcaacatcaacaacttcatcttccacaaggtcctgggcaaaggcagcttcgggaaggtgctgcttggagagctgaagggcagaggagagtactctgccatcaaggccctcaagaaggatgtggtcctgatcgacgacgacgtggagtgcaccatggttgagaagcgggtgctgacacttgccgcagagaatccctttctcacccacctcatctgcaccttccagaccaaggaccacctgttctttgtgatggagttcctcaacgggggggacctgatgtaccacatccaggacaaaggccgctttgaactctaccgtgccacgttttatgccgctgagataatgtgtggactgcagtttctacacagcaagggcatcatttacagggacctcaaactggacaatgtgctgttggaccgggatggccacatcaagattgccgactttgggatgtgcaaagagaacatattcggggagagccgggccagcaccttctgcggcacccctgactatatcgcccctgagatcctacagggcctgaagtacacattctctgtggactggtggtctttcggggtccttctgtacgagatgctcattggccagtcccccttccatggtgatgatgaggatgaactcttcgagtccatccgtgtggacacgccacattatccccgctggatcaccaaggagtccaaggacatcctggagaagctctttgaaagggaaccaaccaagaggctgggaatgacgggaaacatcaaaatccaccccttcttcaagaccataaactggactctgctggaaaagcggaggttggagccacccttcaggcccaaagtgaagtcacccagagactacagtaactttgaccaggagttcctgaacgagaaggcgcgcctctcctacagcgacaagaacctcatcgactccatggaccagtctgcattcgctggcttctcctttgtgaaccccaaattcgagcacctcctggaagattgaggttcctggacagat

SEQ ID NO: 294 - DNA, 624 bp, Homo sapiens
atcgccaatcgagtgactgacaagctgacacctattcacgaccgcattttctgctgtcgctcaggctcagctgctgatacccaggcagtagctgatgctgtcacctaccagctcggtttccacagcattgaactgaatgagcctccactggtccacacagcagccagcctctttaaggagatgtgttaccgataccgggaagacctgatggcgggaatcatcatcgcaggctgggaccctcaagaaggagggcaggtctactcagtgcctatggggggtatgatggtaaggcagtcctttgccattggaggctccgggagctcctacatctatggctatgttgatgctacctaccgggaaggcatgaccaaggaagagtgtctgcaattcacggccaatgctctcgctttggccatggagcgggatggctccagtggaggagtgatccgcctggcagccattgcagagtcaggggtagagcggcaagtacttttgggagaccagatacccaaattcgccgttgccactttaccacccgcctgaatcctgggattctagtatgcaataagagatgccctgtactgatgcaaaatttaataaagtttgtcacagagaaaaaaaaaa

SEQ ID NO: 295 - DNA, 1678 bp, Homo sapiens
aagcagaacctggcctccctggccacagcagccttacccaccgctctacgtgtcccgggcacttcccgcagccttcccgtccctttctcatcggccttgtagttgtacagtgctgttggtttgaaaaggtgatgtgtggggagtgcggctcatcactgagtagagaggtagaatttctatttaaccagacctgtagtagtattaccaatccagttcaattaaggtgattttttgtaattattattattttggtgggacaatctttaattttctaaagatagcactaacatcagctcattagccacctgtgcctgtccccgccttggcccggctggatgaagcggcttccccgcagggcccccacttcccagtggctgcttcctggggacccagggcaccccggcaccttcaggcacgctcctcagctggtcacctcccggctttgccgttcagatggggctcctgaggctcaggagtgaagatgccacagagccgggctcccctaggctgcgtcgggcatgcttggaagctggcctgccaggaccttccaccctggggcctgtgtcagccgccggccctccgcaccctggaagcacacggcctctgggaaggacagccctgaccttcggttttccgagcacggtgtttcccaagaattctgggcttgccgcctggtggcagtgctggagatgaccccgagcccctccccgtggggcacccaggagggccctgccgaaatgtgcagcctgtgggtagtcggctggtgtccctgtcgtggagctggggtgcgtgatctggtgctcgtccacgcaggtgtgtggtgtaaacatgtatgtgctgtacagagagacgcgtgtggagagagccgcacaccagcgccacccaggaaaggcggagcggttaccagtgttttgtgtttatttttaatcaagacgtttcccctgttttcctataaatttgcttcgtgtaagcaagtacataaggaccctcctttggtgaaatccgggttcgaatgaatatctcaaggcaggagatgcatctattttaagatgctttggagcagacagctttagccgttcccaatccttagcaatgccttagctgggacgcatagctaatactttagagaggatgacagatccataaagagagtaaagataagagaaaatgtctaaagcatctggaaaggtaaaaaaaaaaaatctatttttgtacaaatgtaattttatccctcatgtatacttggatatggcggggggagggctgggactgtttcgtttctgcttctagagattgaggtgaaagcttcgtccgagaaacgccaggacagacgatggcagaggagagggctcctgtgacggcggcgaggcttgggaggaaaccgccgcaatgggggtgtcttccctcggggcaggagggtgggcctgaggctttcaagggttttcttccctttcgagtaatttttaaagccttgctctgttgtgtcctgttgccggctctggccttcctgtgactgactgtgaagtggcttctccgtacgattgtctctgaaacatcgtggccgcaggtgccagggtttgatggacagtagcattagaattgtggaaaaggaacacgcaaagggagaagtgtgagaggagaaacaaaatatgagcgtttaaaatacatcgccattcag

SEQ ID NO: 296 - DNA, 837 bp, Homo sapiens
gaattccgcggcggcgcctcaatgcctaaaggaggaagaaagggaggccacaaaggccgggcgaggcagtatacaagccctgaggagatcgacgcgcagctgcaggctgagaagcagaaggccagggaagaagaggagcaaaaagaaggtggagatggggctgcaggtgaccccaaaaaggagaagaaatctctagactcagatgagagtgaggatgaagaagatgactaccagcaaaagcgcaaaggcgttgaagggctcatcgacatcgagaaccccaaccgggtggcacagacaaccaaaaaggtcacacaactggatctggacgggccaaaggagctttcgaggagagaacgagaagagattgagaagcagaaggcaaaagagcgttacatgaaaatgcacttggccgggaagacagagcaagccaaggctgacctggcccggctggccatcatccggaaacagcgggaggaggctgcccggaagaaggaagaggaaaggaaagcaaaagacgatgccacattgtcaggaaaacgaatgcagtcactctccctgaataagtaactgcgacccgtgggaggagatgccggggacctgggccgcgctgccaggacctctgctgtgtctcgcccaccctgtgccctggcgccgctgcaacagcccctcatggccaggagccccccatgcctgggcctcctcttcatcttggcacagaaattgtttgggggatgggggggggactgggggaggggtagctgctatctttgagacagaaagatgcaggacagcatttcatatgtaaccatttgaatgtttttgctgtttttagaattc

SEQ ID NO: 297 - DNA, 2036 bp, Homo sapiens
cgagccccgccgaaccgaggccacccggagccgtgcccagtccacgccggccgtgcccggcggccttaagaacccggcaacctctgccttcttccctcttccactcggagtcgcgctccgcgcgccctcactgcagcccctgcgtcgccgggaccctcgcgcgcgaccgccgaatcgctcctgcagcagagccaacatgcccatcactcggatgcgcatgagaccctggctagagatgcagattaattccaaccaaatcccggggctcatctggattaataaagaggagatgatcttccagatcccatggaagcatgctgccaagcatggctgggacatcaacaaggatgcctgtttgttccggagctgggccattcacacaggccgatacaaagcaggggaaaaggagccagatcccaagacgtggaaggccaactttcgctgtgccatgaactccctgccagatatcgaggaggtgaaagaccagagcaggaacaagggcagctcagctgtgcgagtgtaccggatgcttccacctctcaccaagaaccagagaaaagaaagaaagtcgaagtccagccgagatgctaagagcaaggccaagaggaagtcatgtggggattccagccctgataccttctctgatggactcagcagctccactctgcctgatgaccacagcagctacacagttccaggctacatgcaggacttggaggtggagcaggccctgactccagcactgtcgccatgtgctgtcagcagcactctccccgactggcacatcccagtggaagttgtgccggacagcaccagtgatctgtacaacttccaggtgtcacccatgccctccacctctgaagctacaacagatgaggatgaggaagggaaattacctgaggacatcatgaagctcttggagcagtcggagtggcagccaacaaacgtggatgggaaggggtacctactcaatgaacctggagtccagcccacctctgtctatggagactttagctgtaaggaggagccagaaattgacagcccagggggggatattgggctgagtctacagcgtgtcttcacagatctgaagaacatggatgccacctggctggacagcctgctgaccccagtccggttgccctccatccaggccattccctgtgcaccgtagcagggcccctgggcccctcttattcctctaggcaagcaggacctggcatcatggtggatatggtgcagagaagctggacttctgtgggcccctcaacagccaagtgtgaccccactgccaagtggggatggggcctccctccttgggtcattgacctctcagggcctggcaggccagtgtctgggtttttcttgtggtgtaaagctggccctgcctcctgggaagatgaggttctgagaccagtgtatcaggtcagggacttggacaggagtcagtgtctggctttttcctctgagcccagctgcctggagagggtctcgctgtcactggctggctcctaggggaacagaccagtgaccccagaaaagcataacaccaatcccagggctggctctgcactaagagaaaattgcactaaatgaatctcgttcccaaagaactacccccttttcagctgagccctggggactgttccaaagccagtgaaatgtgaaggaaagtggggtccttcggggcgatgctccctcagcctcagaggagctctaccctgctccctgctttggctgaggggcttgggaaaaaaacttggcactttttcgtgtggatcttgccacatttctgatcagaggtgtacactaacatttcccccgagctcttggcctttgcatttatttatacagtgccttgctcggcgcccaccaccccctcaagccccagcagccctcaacaggcccagggagggaagtgtgagcgccttggtatgacttaaaattggaaatgtcatctaaccattaagtcatgtgtgaacacataggacgtgtgtaaatatgtacatttgtctttttataaaaagtaaattgtt

SEQ ID NO: 298 - DNA, 1093 bp, Homo sapiens
atgaccacccagcagatagacctccagggcccggggccgtggggcttccgcctcgtgggcggcaaggacttcgagcagcctctcgccatttcccgggtcactcctggaagcaaggcggctctagctaatttatgtattggagatgtaatcacagccattgatggggaaaatactagcaatatgacacacttggaagctcagaacagaatcaaaggctgcacagacaacttgactctcactgtagccagatctgaacataaagtctggtctcctctggtgacggaggaagggaagcgtcatccatacaagatgaatttagcctctgaaccccaggaggtcctgcacataggaagcgcccacaaccgaagtgccatgccctttaccgcctcgcctgcctccagcactactgccagggtcatcacaaaccagtacaacaacccagctggcctctactcttctgaaaatatctccaacttcaacaatgccctggagtcaaagactgctgccagcggggtggaggcgaacagcagacccttagaccatgctcagcctccaagcagccttgtcatcgacaaagaatctgaagtttacaagatgcttcaggagaaacaggagttgaatgagcccccgaaacagtccacgtctttcttggttttgcaggaaatcctggagtctgaagaaaaaggggatcccaacaagccctcaggattcagaagtgttaaagctcctgtcactaaagtggctgcgtcgattggaaatgctcagaagttgcctatgtgtgacaaatgtggcactgggattgttggtgtgtttgtgaagctgcgggaccgtcaccgccaccctgagtgttatgtgtgcactgactgtggcaccaacctgaaacagaagggccatttctttgtggaggatcaaatctactgtgagaagcatgcccgggagcgagtcacaccacctgagggttatgaagtggtcactgtgttccccaagtgagccagcagatctgaccactgttctccagcaggcctctgctgcagctttttctctcagtgttctggccctctcctctcttgaaagttctctgcttactttggtt

SEQ ID NO: 299 - DNA, 1652 bp, Homo sapiens
ccttccccctgtagggccggccggcgagtcccagtgagagcggagggtgccagaggtagggggccgagaaacaaagttcccggggctccctccggggccgcggtcggggctgcgcgtttgaccgcccccctcctcgcgaaggcaatggcttccaaactcctgcgcgcggtcatcctcgggccgcccggctcgggcaagggcaccgtgtgccagaggatcgcccagaactttggtctccagcatctctccagcggccacttcttgcgggagaacatcaaggccagcaccgaagttggtgaggtggcaaagcagtatatagagaaaagtcttttggttccagaccatgtgatcacacgcctaatgatgtccgagttggagaataggcgtggccagcactggctccttgatggttttcctaggacattaggacaagccgaggccctggacaaaatctgtgaagtggatctagtgatcagtttgaatattccatttgaaacacttaaagatcgtctcagccgccgttggattcaccctcctagcggaagggtatataacctggacttcaatccacctcatgtacatggtattgatgacgtcactggtgaaccattagtccagcaggaggatgataaacccgaagcagttgctgccaggctaagacagtacaaagacgcggcaaagccagtcattgaattatacaagagccgaggagtgctccaccaattttccggaacggagacgaacaaaatctggccctacgtttacacacttttctcaaacaagatcacacctattcagtccaaagaagcatattgaccctgcccaatggaagaaccaggaagatgtggtcattcattcaatagtgtgtgtagtattggtgctgtgtccaaattagaagctagctgaggtagcttgcagcatcttttctagttgaaatggtgaactgataggaaaacaaatgagtagaaagagttcatgaagaggccctcctctgcctttcaaaagggtggtcacctacacatgtttaaggtgtctctgcacatgtctcaagcccatcacaagaaagcaagtacagtgtggatttcaaatggtgtgtaacttcagctccagctggtttttgacagctgttgctgtggtaatattttttacatgtgatggtgatagtctctggttctccccatccccacaaaggctgttgaaccacagcaccaggaagcctgagaatgaatcctgagggctctagcccaggctttgtcccaggctttctggtgtgtgccctcctggtaacagtgaaattgaagctacttactcatagtggttgtttctctggtcttgagtgactgtgtccacagttcatttttttccggtaggaataactccttttctacatccacactccatagagtctctccttttcagatatcctgggatgaaagaatttggctttttttttttttttttttttgacatctgttttcactcttaggcttttaaacaatagttattgctcttatccctctcagattctaataactgagagtgatggggctatattgaatctctgtatgcactgagaactgagctatgaagaggatcttattaaactgctggtctgactttatggattgacactgttcctttcttttattgtg

SEQ ID NO: 300 - DNA, 2720 bp, Homo sapiens
cgcccccccggtgtccgccctgctgtcggcgctggggatgtcgacgtacaagcgggccacgctggacgaggaggacctggtggactcgctctccgagggcgacgcataccccaacggcctgcaggtgaacttccacagcccccggagtggccagaggtgctgggctgcacggacccaggtggagaagcggctggtggtgttggtggtacttctggcggcaggactggtggcctgcttggcagcactgggcatccagtaccagacaagatccccctctgtgtgcctgagcgaagcttgtgtctcagtgaccagctccatcttgagctccatggaccccacagtggacccctgccatgacttcttcagctacgcctgtgggggctggatcaaggccaacccagtccctgatggccactcacgctgggggaccttcagcaacctctgggaacacaaccaagcaatcatcaagcacctcctcgaaaactccacggccagcgtgagcgaggcagagagaaaggcgcaagtatactaccgtgcgtgcatgaacgagaccaggatcgaggagctcagggccaaacctctaatggagttgattgagaggctcgggggctggaacatcacaggtccctgggccaaggacaacttccaggacaccctgcaggtggtcaccgcccactaccgcacctcacccttcttctctgtctatgtcagtgccgattccaagaactccaacagcaacgtgatccaggtggaccagtctggcctgggcttgccctcgagagactattacctgaacaaaactgaaaacgagaaggtgctgaccggatatctgaactacatggtccagctggggaagctgctgggcggcggggacgaggaggccatccggccccagatgcagcagatcttggactttgagacggcactggccaacatcaccatcccacaggagaagcgccgtgatgaggagctcatctaccacaaagtgacggcagccgagctgcagaccttggcacccgccatcaactggttgccttttctcaacaccatcttctaccccgtggagatcaatgaatccgagcctattgtggtctatgacaaggaataccttgagcagatctccactctcatcaacaccaccgacagatgcctgctcaacaactacatgatctggaacctggtgcggaaaacaagctccttccttgaccagcgctttcaggacgccgatgagaagttcatggaagtcatgtacgggaccaagaagacctgtcttcctcgctggaagttttgcgtgagtgacacagaaaacaacctgggctttgcgttgggccccatgtttgtcaaagcaaccttcgccgaggacagcaagagcatagccaccgagatcatcctggagattaagaaggcatttgaggaaagcctgagcaccctgaagtggatggatgaggaaacccgaaaatcagccaaggaaaaggccgatgccatctacaacatgataggataccccaacttcatcatggatcccaaggagctggacaaagtgtttaatgactacactgcagttccagacctctactttgaaaatgccatgcggtttttcaacttctcatggagggtcactgccgatcagctcaggaaagcccccaacagagatcagtggagcatgaccccgcccatggtgaacgcctactactcgcccaccaagaatgagattgtgtttccggccgggatcctgcaggcaccattctacacacgctcctcacccaaggccttaaactttggtggcataggtgtcgtcgtgggccatgagctgactcatgcttttgatgatcaaggacgggagtatgacaaggacgggaacctccggccatggtggaagaactcatccgtggaggccttcaagcgtcagaccgagtgcatggtagagcagtacagcaactacagcgtgaacggggagccggtgaacgggcggcacaccctgggggagaacatcgccgacaacgggggtctcaaggcggcctatcgggcttaccagaactgggtgaagaagaacggggctgagcactcgctccccaccctgggcctcaccaataaccagctcttcttcctgggctttgcacaggtctggtgctccgtccgcacacctgagagctcccacgaaggcctcatcaccgatccccacagcccctctcgcttccgggtcatcggctccctctccaattccaaggagttctcagaacacttccgctgcccacctggctcacccatgaacccgcctcacaagtgcgaagtctggtaaggacgaagcggagagagccaagacggaggaggggaaggggctgaggacgagacccccatccagcctccagggcattgctcagcccgcttggccacccggggccctgcttcctcacactggcgggttttcagccggaaccgagcccatggtgttggctctcaacgtgacccgcagtctgatcccctgtgaagagccggacatcccaggcacacgtgtgcgccaccttcagcaggcattcgggtgctgggctggtggctcatcaggcctgggccccacactgacaagcgccagatacgccacaaataccactgtgtcaaatgctttcaagatatatttttggggaaactattttttaaacactgtggaatacactggaaatcttcagggaaaaacacatttaaacacttttttttttaagccc

SEQ ID NO: 301 - DNA, 1228 bp, Homo sapiens
ccgcagcgccgtagtcaaaccgaacccggcccagtcccgtcctgcagcagtctgcctccttctttcaacatgacagatgccgcattgtccttcgccaaggacttcctggcaggtggagtggccgcagccatctccaagacggcggtagcgcccatcgagcgggtcaagctgctgctgcaggtgcagcatgccagcaagcagatcactgcagataagcaatacaaaggcattatagactgcgtggtccgtattcccaaggagcaggaagttctgtccttctggcgcggtaacctggccaatgtcatcagatacttccccacccaggctcttaacttcgccttcaaagataaatacaagcagatcttcctgggtggtgtggacaagagaacccagttttggcgctactttgcagggaatctggcatcgggtggtgccgcaggggccacatccctgtgttttgtgtaccctcttgattttgcccgtacccgtctagcagctgatgtgggtaaagctggagctgaaagggaattccgaggcctcggtgactgcctggttaagatctacaaatctgatgggattaagggcctgtaccaaggctttaacgtgtctgtgcagggtattatcatctaccgagccgcctacttcggtatctatgacactgcaaagggaatgcttccggatcccaagaacactcacatcgtcatcagctggatgatcgcacagactgtcactgctgttgccgggttgacttcctatccatttgacaccgttcgccgccgcatgatgatgcagtcagggcgcaaaggaactgacatcatgtacacaggcacgcttgactgctggcggaagattgctcgtgatgaaggaggcaaagcttttttcaagggtgcatggtccaatgttctcagaggcatgggtggtgcttttgtgcttgtcttgtatgatgaaatcaagaagtacacataagttatttcctaggatttttccccctgtgaacaggcatgttgtattctataacacaatcttgagcattcttgacagactcctggctgtcagtttctcagtggcaactactttactggttgaaaatgggaagcaataatattcatctgaccagttttctcttaaagccatttccatgcatgatgatgatgggactcaattgtattttttatttcagtcactcctgactaaataacaatttggagaaataaaaatagtctaaaat

SEQ ID NO: 302 - DNA, 647 bp, Homo sapiens
gggcgccgccatcgccgtcatgctgggcgccgctctccgccgctgcgctgtggccgcaaccacccgggccgaccctcgaggcctcctgcactccgcccggacccccggccccgccgtggctatccagtcagttcgctgctattcccatgggtcacaggagacagatgaggagtttgatgctcgctgggtaacatacttcaacaagccagatatagatgcctgggaattgcgtaaagggataaacacacttgttacctatgatatggttccagagcccaaaatcattgatgctgctttgcgggcatgcagacggttaaatgattttgctagtctagttcgaatcctagaggttgttaaggacaaagcaggacctcataaggaaatctacccctatgtcatccaggaacttagaccaactttaaatgaactgggaatctccactccggaggaactgggccttgacaaagtgtaaaccgcatggatgggcttccccaaggatttattgacattgctacttgagtgtgaacagttacctggaaatactgatgataacatattaccttattttgaacaagtttccctttattgagtaccaagccatgtaatggtaacttggactttaataaaagggaaatgagtttgaactg

SEQ ID NO: 303 - DNA, 5204 bp, Homo sapiens
gtaatatcttgggcaagccctagagcttctttcctgacccttagttaataagatgttatctggtcacattcagtcacaataatagactcattttagtaataaacatcttaagactagtaattaaaactctttacttcacaccaagtttcctccccaagcttggcctgttcctggctggcagcctgaagtagggaaaggagagatatggtgaccttttctttgtacctttctagctaccctctataccctgaccccacatacataattgagctgtggcttctgactctactgggtttggggatgagaggcagtgagagtaaaatgaaggagtggttttaattaatggcacagctaaaactggattttgttctctctgcacatggcagatgtttaaagctcattctttcttttatgcaagtttttacaccatccagcctcatttgtacctcttgaatttttgctcagtggcctatcaccattcaggatcaagacaaaaatcaatgagcacttattgtgtgtcatgcaccctacaaagtgccaggatatttatccaaactcctggcaatgctaaacacaatgcaaaaagacatattagaaaacgaatcttattaactttagcttttcaactgtatttcatcataaagtcttactttacaagataattgctgttgtgaaaaagggaaaggtcatggtctcatttcccagatgttatttgatatatgctataaattatattacctccaacatagtctgcactttgaacttagaaaaacaatcttcagacggcatgcattctaattcttgaaataagtatgcccacaaactgtagtttaagacagaataggtatgcttctcatgttttaattcagttgaatttcagaagatctcaggaatgtacagaacgagaattaagaattaataagaataagaattaattaattgcttgacatagagtagttaggtgatttcctgaactttaagcttccacatcacagtatgaagttggttcaagataagaaatataataaattctcgcccaaggacagacctgaatctctagctgcctagaggctgactcaactgaaatcatggcgtttgacagcacttggaaggtagaccggagtgaaaactatgacaagttcatggaaaaaatgggtaaagactttatttctttgtggctcattctttgctttcttacaaacatttttctttctaactcctaaatctctaggagattacagatagcttacagatagctcctgatgtggtagagagggatccagaagatgttcagaggagggaaaccatattttcccttcttacattaggaagaatccactatctcactaatggaagaaaagattctttgagtgctgttctctgaaacacaccaaaaagatccagaaatgtttccttcactctttaactgaaaaatgactttttttgttgtttacagtaagaaaatggcagcgtgtaatgataacttccagatctgaaaatgttaaattctaggagatggaaaaacaaagaccatataagaaagtaatggaaaaagttctcttaaaatttatagctctgaataagttagatttaattctgatttcttctaacttaaaaaagttttggaataatcttgagaagctgtgtagttttctccagggcgtttaatttaactgatttataatttgataccaatactctggcagcccatatactatacaagataggcaaacaaatttgtgtcattcccctaaaagaaaaatctgcatcaattatagcttacagtttaggaactctaagtttaaatttataaaagttgtagattcttatagtgattttggcttaatatttgctaattttctcatttttgtgtcagaaagaaatgccacaagaagcaaatagaactataaagttcaaaatgttaaagccactaagaaaaacaaaggggcatttaagaaaaaagaatactgtatatgtggaattaaagatgtgcttccttataaatatatgaatatacattttaatccttcatttaatatttctagaatttgatttacttaacactgaaatgaacagtttgttaatcttattaaggttgctcagctctaagattctataattctgtactctacttaatttttctcaagttatggaaaaacaactttaatcagttctcttgatcggattgaacctgaacttctatagaagcaatctgaatgttcttgtgcaaaggcaatgctaccgagttttcttcccaccctcaaaataaacaaacaaaacataacttggaaaaataaacacttcctatgggatttgactttattttctccattgtcttaccttttacaggtgttaatatagtgaaaaggaagcttgcagctcatgacaatttgaagctgacaattacacaagaaggaaataaattcacagtcaaagaatcaagcgcttttcgaaacattgaagttgtttttgaacttggtgtcacctttaattacaacctagcagacggaactgaactcagggtaagaatttttttttttatgagcaatgcattcttgatttttctacccaatattaaaatgatttctgctctatttcattggatggtttaattaatgcaggtctccttcactaactgaagaagccaatgaagtttgtctacattatatattacacaaattggcagggtatttaaatatgcttttatttttatacgcatctgtgaagaatctgaattgaacagtaagaattagaaaactatcttttgaatgactgaatatagacctattcataaagaaatttaaaactgtgtttttaaacagtacagcaaaagaagcctttagagttaatatgtaacttaactgtaacatgttgaaataataaaagaaatgaatagatgaacaaatgagtgagttaccaaatggaaagatttgatgtattgtaggtcattgggagtgtaccttttcatgtttaagataacacattttaggaagtcatcattttcaacaaattttttaaaaactttttttagcctcaacatttttctatttaaattacatgtttgtaatgacaatttaactactgaatgttttatcgtaagttatgtctttccttaattagtaccacaatcacacaaattaaaacaagcacaggttattaacatctccgtgaaactaattttaaccatgactatatttctggacacgtaacatgaaagattcagaaagaagtgctgctcatctgccttaaaattcagcgtatggaaattattgaagagaacaagcataatggttatcaacacatactctgtagcccaatggcctaggttcaatcctcactctgtgactttaggtgaatcactgtgccattttacagtctcctcttctgcaaagtagagatagtagtatcagtttcatagggtcaccatgaagattaaatgaaaaagtgtgtctacagaactcagaacagtgcctgacatgtgtaagaccctaataaatgccattattattattattattattattattattattattattatgtaggggacctggagccttgagggaaataaacttattggaaaattcaaacggacagacaatggaaacgaactgaatactgtccgagaaattataggtgatgaactagtccaggtgagttgtcaaatttatagctattttcaaaaggcaaaaattactacaaaacaataatttttgtcactgctgagccagatcttcagtaaactgactacttcttttctcataaatcttactgattttaaaaatattgtatagctattttctgatgcctatttactaaagacaacttatatatgtcaaataatcaatgcctattttaactgaaaatataaatgactacaaaccaacatgtgttttaaaatggctgtatcccatatctgtataaatcttgctatcaagtacaagaaaaaattgtataaactcatactcatataatatatatgaatatataatataaaaatagtataaactcatatagtataaaactataatactactttttcttaacttagatgtaaaccttaaagataaattcttctgtttgttaacacctttcagacttatgtgtatgaaggagtagaagccaaaaggatctttaaaaaggattgagcattattcttggcgcacagtccaaaatacaaattggacagaagatctatattgtaccagaactgtttatttcaccccatcaagtataaggttactgattgattggtccttttataaacattggtatatttccattcatgccaaagcaaaagaagtaaaagctaattaggatttaatttgttttatattctctaagatatatatttactaaaagaatttgtgacattttaaaaaacaaaaataaatattgcatccatgttgctttatatgtagccttgccttttaaaagaaaaagtatgtgaatatgaattgacagattgttttcgtagagagagggtcttactctttcactcaggctggaatgcagtggagagatcatagctcactgtaacctcaaactcctggactcatgcaatcttcctgcctcaggcttctgagtagctaggactatgggtacattccacagtgcccagctaatttttgttttgttttctttttattttttttagagatggggtcttgctatattgcccaggctggtcttgaacccctggcctcaagcaatcctcctgcctcagcctctcaagttgtttttttctttacatttgataaactaaaagcataggctgcatatgagtctttaacatcttgaactggttgtgaataattttctggcactggttgtaagtaatatctattattataaaaataatatatgctcaaccagaaaacttagaaataagaaacacaaatgtaaaataagtatttccataactcataatccagagataattgccattctgattttgatagatatcctctcagctctcttccctgggggcagatatttcccaatacataccactttgaataggatgataggaaataaatgatgtactacattaaattaaattattgtattacatttttgtacacatcagtcattcccaggcttggctgaaaatcaggatcatctgagaaacttaaacaatttctgcattcttaatctccactgttattctattatatcagaatcgctaatagaaccaagaattc

SEQ ID NO: 304 - DNA, 9043 bp, Homo sapiens
ggatccgggtcccctcacgctcctggctgagtccctggcttcacaggggaaactacctccgcaggccaggacccatctagttacaggatacctcgatgttacaaagacgaggcttccagcgcgggggcgtggaggcggctgccagccctgcccgcagcgtgctggcgacccccgggacgccccttccctcccgcgcctctgctccctagctggtgggagcagagcgcaccgggatcacttccaggtcccttgcaccggaggaatgggcggcagcagggtccggagtcggcccggcggggcccacgtggccagcacatcggtcctccgctcgcgatttcccttttccgctctcgggcacgaggtactgaacgccaggtggaagcacagctgtgcagctacaggctctgccgttcagctgccgcgggccggggccggggcctgcggcgtcgtgcgcgtgcgcggaccagttccaggcgggcgagaccgccgcagggcggggcggggcgaggcggccgcagggcggggagggcggggagaggcggccgcagggcggggagggcggggcgcgaagccgggggcgggggccacgcgtggggcaggcggtgctcggctcggctgacgtcggcccgccggcgccccaccagctccgcgcgggcccgggttggccaccgccgggcccccgcccctcccccggccgtgtcccggccggaaccgatcgtggctggtttgagctggtgcgtctccatggcgacccgccggtgctataagtagggagcggcgtgccgtggggctttgtcagtccctcctgtagccgccgccgccgccgcccgccgcccctctgccagcagctccggcgccacctcgggccggcgtctccggcgggcgggagccaggcgctgacgggcgcggcgggggcggccgagcgctcctgcggctgcgactcaggctccggcgtctgcgcttccccatggggctggcctgcggcgcctgggcgctctgaggtgagggactccccggccgcggaggaagggagggagcgagggcgggagccggggcgggctgcgggccccgggccccgggcacgtgtgcggcgcgcctcgccggcctgcagagacacgtggtcgccgagcgggccacgaccttgaggcgccgcttcctcccggcccggggttctcccgcggctggataagggtgatccgggcgcctcgttctgcccccgtcttcacagctcggggctggaggggcctaggggagacccacccggagaccctgcggccccgcgccggcctctttcccaacccttcggcggccgcgcgctggccggggagccgttggggaggccctggcggccgcgcagcaggtgcaggggcgcagagcctgggctcgccttggtacagacgagcggccccggccttggcgccttcagtttccttccagtttttattttcgctgtgtctacagagcagatgacaccaatttggaaacccgcgagagtgggtagagctaagatagtcttgctgtagtagctgtgatattagatgctcggccatgacttagaggtgtttatttaaggactgtgaatgactcggtgatttcggaaaagcttggcttagatgaacggacatacacaggggagacagccctaaggtttgcagaaaaggctgattgtgctgtttgcgaagtcgaaataattggtgaaagtgtagaaggcagaacctctcaggaatgtctggggaggacaaagaatgtgttggctgactttgtttaaacataaaattgggcagactttaattgatttgtgaaatttttttcaaagtttgtttgaattagcccctatctcttctaacattatcctcttgtgctaattgattgaccattttaaataacttagctgttacagaaagaccgaaaggtgttcttcagtaaaatatattcaagtaagttacttaagtaacgccttaaaagatacagaaaagcaaaaaagtattggcgtattaaaaagaaatcaaaactttccaagtttaggcctgaacattgccttaaaaatatttaataaggcctcaaatgacccagtccgagactgcatgagcctatttattattaaattgtaaatattcttcatataaacaaaaatatataaccatgtctgtaacaaaaatggttttgctagcgttgttactctcttcccttctccgaggggtgatttaggcaacttcggaggttgacaatgccaagcagtcacaatagatagagctttaaagcaaattctatgcatgggtttggatttatgacaggcccgtcaccctgggcctgtcatagtaccccatgccagagcaaactgtgtccccgaaccattgcctggcctctgtgcccgtaggctgctggcactgaagtgggttgcacagtggaaaagaagaaagctctacctggcagaaatttttaaaggttaaaataaataattttaagaaagctggttcacaaggtgccacatttgatgaaagcaaaatacagtggcttttattgttactagagtgatgttcttgcttgtttttcttttttggtgaagttagccccaaattattctcatagctaagcaaatacgagagtgactgtaaggacagttggcattcccggaattgctaaacttggtaggcaacgctggtttaagaatactgagttctagccgggcgtggtggctcacgcctgtaatcccaacactttgggaggctgaggcaggcggatcacctgaggtcgggagttggagaccagcctgactaacatggagaaacgccatctccactaaaaatataaaattagccaggccccgggtgtggtggcacatgccggtaatcccagctactcgggagactgaggcaggagaatcgcttgaacccaggaggcggaggttgaggtgagccgagatcatgccattgcactccagcctgggcaacaagagtaaaactctgtctcaaaaaaaaaaaaaaaaaaatactgaattctgatcaggtaacagcaactgtaatacaatgtgataagttgacttgaagattacagtttttaagaagtatatacccagctaatacatgaaaattaactcgtaaaatctcaaatgctccagacatttccatgatgcctgttggtcagtaaaaatcattctaagacttagtggaagtaggaaatgtttgtatggctgtgtataaaggctataatgtaatcccagcactttggaagaccgaggcgggtggatcacctggggtcaggagtttgagacccacctggacaacgtggtgaaatcctgtctctactaaaaacacaaaaattagccgggcatggtggcaggcgcctgtaatcccagctgctggggaggctgaggcaggagaatcgcttgaacccgggaggcagaggttgcagtgagccaagattgcaccgctgcactccagcctgggtgacagcgtgagactctgtctcaaaaaaaataaaaaagtctataatgctattttaagtttctaaggaactgaaactgctctgaaataaatcagaccattataagacttttttccatatcagtgagctaagtgcagataagcttctgaaacttgcatgctagatttttttggtacaaatatttgaaatgcttagtgtgctgccttggaaaaacctggtattttttgttgtgtccttatactgccaaggtttatggaatcatgtaccttatgcctagtaataattaggatgaccaggccagtgagtggttcatatccggggcatgattagctctgcgtgtgctcagccagtgccccatcttcaactcgatgtgttcctaaggtagacagcaaattccctattttatttctcagattgtcactgctgttccaagggcacacgcagagggatttggaattcctggagagttgcctttgtgagaagctggaaatatttctttcaattccatctcttagttttccatgtaagtattcagtttacatttatgttgcaggttaatcttaagaattgtattgctaaggcttctaagtgaatttctccactctatttgcattttgttgcatttcagaggaacatcaagaaatcatgaacaactttggtaatgaagagtttgactgccacttcctcgatgaaggttttactgccaaggacattctggaccagaaaattaatgaagtttcttcttctgtaagtatatgaggcccatgctggcagtgcagctgagagtgccaggcaagtggaaaactttggcaaggtctaaggaagagcaatgaggcttacatgtcttgttatggaatgtagaaattaattcactggtggtaaattaatagtgataatggtgatactcatatcagtggctagactcaaaagagcaggattcattgtgactgatgggaatgaaggtcgctggctattggtgtggtgtgtggtgaggctgctagtgagtcacctgtgaccactcttgtttcaggatgataaggatgccttctatgtggcagacctgggagacattctaaagaaacatctgaggtggttaaaagctctccctcgtgtcacccccttttatgcagtcaaatgtaatgatagcaaagccatcgtgaagacccttgctgctaccgggacaggatttgactgtgctagcaaggtaagcgatagcagcaggcctcaaaagcgttgtataaaatgggcctggtattccccacgaggcagatacaagttgtgttttttgggcaataaatgctcactaaaggcaaatggggcgggggggtacatgacaacttcccatgcttttctgtttattccacgtgttaagccacatatggatagcatgacaccactcttctttttcagactgaaatacagttggtgcagagtctgggggtgcctccagagaggattatctatgcaaatccttgtaaacaagtatctcaaattaagtatgctgctaataatggagtccagatgatgacttttgatagtgaagttgagttgatgaaagttgccagagcacatcccaaagcaaagtgagttattcccccatctgagggcaagatcgggagcataagatatgtggattcttatcaaacaaacttaaatttctgattattatatttctatactttagtagaaagtagttgaaacccccattgagtcatgaagcctgggactcaaactacagaatatatcagcgacagtatttagaacaggattgtttttattttaattgtggctataagtgaacatctatcatgagacatttgctgcactttccttgcttgtaggttggttttgcggattgccactgatgattccaaagcagtctgtcgtctcagtgtgaaattcggtgccacgctcagaaccagcaggctccttttggaacgggcgaaagagctaaatatcgatgttgttggtgtcaggtgagattttggtgggatagctagaggtcaagacattgaacagtttgagttttacaggctttctcctagtgtttgctattattttaagaaatactaagacacagtgtctcgtctctttattttaccccagcttccatgtaggaagcggctgtaccgatcctgagaccttcgtgcaggcaatctctgatgcccgctgtgtttttgacatgggggtgagtatacgtgaccctgttagggaagggcgggacacaactgacaataactagtcttaattctagagttaactttttatggcagttggttctgtattacatgggtttcagcctatctgctgcatacatttttgttattagctgtggatctggctgacttattttcttgattctaggctgaggttggtttcagcatgtatctgcttgatattggcggtggctttcctggatctgaggatgtgaaacttaaatttgaagaggtaatttagaacaaaactgtaatactcagtagccgttctaataaattcctttttggaatatttcaaaatttaagtgtcttaactaataccacaatgggctgaagtgtcttggtgtgatattttgagtgatttctttgtgctgtctgacattacacttgataccatttggttttctaaagtgtgaatcagctttcccagaagtcttggataattggttacattggaaatcatggctcacacctgtaatccagcacttggggaggccaaggtggtaggatcacttgagcccaggagtttgagaccagcctgggcaacacagtgagaccccatctctacaaaaaaaattttaaaattagcctggtgtggtggcgggcacctgtaatcccagctacttggaaggctgaggtgggaggatcacttgagcccaggaggttgaggctgcagtgagccatgatcatgccactgcactcagcctgggctacagagtgagaccctgtctcaaaaaaaaaaaagaaaaagcatgttgctgtgggcttcctagagaatatgctgactgtagcacatcatcaccccaaatgtgctttgctagacctatgcttcctctccttaaaatacttgaaatgtttagtcacttaggaagttaagccattatattggtgcttgaatttataaaatacatccacatggtttgttaaaatcatgacgtaggcagaataggatttttatcctgttggcatgtatttgttaaaatgttttgacatcttgatgccttcctaggtagtagttagttgcgtactgttctttgataaaaatcatacccataacatcctaaaggagatagggtgcctggaggggaatgaaaacgagccacctgggatatgtagcctggttttcagggagatgttgatgtttttttgcttttgttactttaatgataaacctgtctgttgatgcctggtctcatgatgtcatgtcacaaggccctgtgatgttactcccccatgtgaatttcccacaatgaaggctgctctttcttttctgtttcactctcttagatcaccggcgtaatcaacccagcgttggacaaatactttccgtcagactctggagtgagaatcatagctgagcccggcagatactatgttgcatcagctttcacgcttgcagttaatatcattgccaagaaaattgtattaaaggaacagacgggctctgatggtatgtataaaggacgaatcacttcatgtataactgaaagctgatgcaaaaagtcattaagattgttgatctgcctttctagacgaagatgagtcgagtgagcagacctttatgtattatgtgaatgatggcgtctatggatcatttaattgcatactctatgaccacgcacatgtaaagccccttctgcaaaaggtaatttctgagcatactgtataaaacaattaagaggactggtcacaacacgtgtaattaagtagtacttcctctctccgtctctttatatagagacctaaaccagatgagaagtattattcatccagcatatggggaccaacatgtgatggcctcgatcggattgttgagcgctgtgacctgcctgaaatgcatgtgggtgattggatgctctttgaaaacatgggcgcttacactgttgctgctgcctctacgttcaatggcttccagaggccgacgatctactatgtgatgtcagggcctgcgtggtaagtaagccatgcatgttgatggtgctgccaagaataggcaccttcttggatgtgtgcttcttgtctagacgaataagaaattgtcttgcctaagattaaatatatatggatatttttcctaagaaaagttttagaaaagactgatgagtgtatttctatgtaattggaatatatttaagttcatgccatgtgtcttgtggtttccttattaccaaaacggtgactgaagaaacgcttgctttagaaatacattgaattggccaggtgtgctggctcacacctgaaatcacaacacattgggaggccaaggcagaaggatcacttgagcccaggagttcgagcctgggcaacatagtgagaccctgtctctacaaaaaattaaaaaattagttggccatggtagtgggcgcctgtagtcccagctgcttggctaaggtgagaggtttgcttgagcctgggaggttgaggctgcggtgagctatgatagcaccattgtattccagcctgagtaacagagaaagaccctgtctcagaaaaaaaaaaaatacattgaattgtttcctgatgggaagtaaatactctcatgcccagttaggagtgagtcagggtttttaatatgccactttttctttctcaggcaactcatgcagcaattccagaaccccgacttcccacccgaagtagaggaacaggatgccagcaccctgcctgtgtcttgtgcctgggagagtgggatgaaacgccacagagcagcctgtgcttcggctagtattaatgtgtagatagcactctggtagctgttaactgcaagtttagcttgaattaagggatttggggggaccatgtaacttaattactgctagttttgaaatgtctttgtaagagtagggtcgccatgatgcagccatatggaagactaggatatgggtcacacttatctgtgttcctatggaaactatttgaatatttgttttatatggatttttattcactcttcagacacgctactcaagagtgcccctcagctgctgaacaagcatttgtagcttgtacaatggcagaatgggccaaaagcttagtgttgtgacctgtttttaaaataaagtatcttgaaataattaggcattgggacgtttttatggtgtgttcattccagacagttcacgaatcccgtatagctcgctctgattctcagagaacaatgagtgggtccacccacacacaggtaggaggacaggtgagacggaagccccatcctcccatgtggacggtgcacatctgctcagcccaccccacatgtccagagttggctgcaaactccttgtccagagcctctggtggtgggacctacttaagtctgacggacctgtcctgtccaggccagtgcccagggaaggtgtgggaggccctttgagcctggcctgcag

SEQ ID NO: 305 - DNA, 2824 bp, Homo sapiens
gcggccgctttcgatttcgctttcccctaaatggctgagcttctcgccagcgcaggatcagcctgttcctgggactttccgagagccccgccctcgttccctcccccagccgccagtaggggaggactcggcggtacccggagcttcaggccccaccggggcgcggagagtcccagacccggccgggaccgggacggcgtccgagtgccaatggctagctctaggtgtcccgctccccgcgggtgccgctgcctccccggagcttctctcgcatggctggggacagtactgctacttctcgccgactgggtgctgctccggaccgcgctgccccgcatattctccctgctggtgcccaccgcgctgccactgctccgggtctgggcggtgggcctgagccgctgggccgtgctctggctgggggcctgcggggtcctcagggcaacggttggctccaagagcgaaaacgcaggtgcccagggctggctggctgctttgaagccattagctgcggcactgggcttggccctgccgggacttgccttgttccgagagctgatctcatggggagcccccgggtccgcggatagcaccaggctactgcactggggaagtcaccctaccgccttcgttgtcagttatgcagcggcactgcccgcagcagccctgtggcacaaactcgggagcctctgggtgcccggcggtcagggcggctctggaaaccctgtgcgtcggcttctaggctgcctgggctcggagacgcgccgcctctcgctgttcctggtcctggtggtcctctcctctcttggggagatggccattccattctttacgggccgcctcactgactggattctacaagatggctcagccgataccttcactcgaaacttaactctcatgtccattctcaccatagccagtgcagtgctggagttcgtgggtgacgggatctataacaacaccatgggccacgtgcacagccacttgcagggagaggtgtttggggctgtcctgcgccaggagacggagtttttccaacagaaccagacaggtaacatcatgtctcgggtaacagaggacacgtccaccctgagtgattctctgagtgagaatctgagcttatttctgtggtacctggtgcgaggcctatgtctcttggggatcatgctctggggatcagtgtccctcaccatggtcaccctgatcaccctgcctctgcttttccttctgcccaagaaggtgggaaaatggtaccagttgctggaagtgcaggtgcgggaatctctggcaaagtccagccaggtggccattgaggctctgtcggccatgcctacagttcgaagctttgccaacgaggagggcgaagcccagaagtttagggaaaagctgcaagaaataaagacactcaaccagaaggaggctgtggcctatgcagtcaactcctggaccactagtatttcaggtatgctgctgaaagtgggaatcctctacattggtgggcagctggtgaccagtggggctgtaagcagtgggaaccttgtcacatttgttctctaccagatgcagttcacccaggctgtggaggtactgctctccatctaccccagagtacagaaggctgtgggctcctcagagaaaatatttgagtacctggaccgcacccctcgctgcccacccagtggtctgttgactcccttacacttggagggccttgtccagttccaagatgtctcctttgcctacccaaaccgcccagatgtcttagtgctacaggggctgacattcaccctacgccctggcgaggtgacggcgctggtgggacccaatgggtctgggaagagcacagtggctgccctgctgcagaatctgtaccagcccaccgggggacagctgctgttggatgggaagccccttccccaatatgagcaccgctacctgcacaggcaggtggctgcagtgggacaagagccacaggtatttggaagaagtcttcaagaaaatattgcctatggcctgacccagaagccaactatggaggaaatcacagctgctgcagtaaagtctggggcccatagtttcatctctggactccctcagggctatgacacagaggtagacgaggctgggagccagctgtcagggggtcagcgacaggcagtggcgttggcccgagcattgatccggaaaccgtgtgtacttatcctggatgatgccaccagtgccctggatgcaaacagccagttacaggtggagcagctcctgtacgaaagccctgagcggtactcccgctcagtgcttctcatcacccagcacctcagcctggtggagcaggctgaccacatcctctttctggaaggaggcgctatccgggaggggggaacccaccagcagctcatggagaaaaaggggtgctactgggccatggtgcaggctcctgcagatgctccagaatgaaagccttctcagacctgcgcactccatctccctcccttttcttctctctgtggtggagaaccacagctgcagagtagcagctgcctccaggatgagttacttgaaatttgccttgagtgtgttacctcctttccaagctcctcgtgataatgcagacttcctggagtacaaacacaggatttgtaattcctactgtaacggagtttagagccagggctgatgctttggtgtggccagcactctgaaactgagaaatgttcagaatgtacggaaagatgatcagctattttcaacataactgaaggcatatgctggcccataaacaccctgtaggttcttgatatttataataaaattggtgttttgt

SEQ ID NO: 306 - DNA, 1362 bp, Homo sapiens
catttggggacgctctcagctctcggcgcacggcccagcttccttcaaaatgtctactgttcacgaaatcctgtgcaagctcagcttggagggtgatcactctacacccccaagtgcatatgggtctgtcaaagcctatactaactttgatgctgagcgggatgctttgaacattgaaacagccatcaagaccaaaggtgtggatgaggtcaccattgtcaacattttgaccaaccgcagcaatgcacagagacaggatattgccttcgcctaccagagaaggaccaaaaaggaacttgcatcagcactgaagtcagccttatctggccacctggagacggtgattttgggcctattgaagacacctgctcagtatgacgcttctgagctaaaagcttccatgaaggggctgggaaccgacgaggactctctcattgagatcatctgctccagaaccaaccaggagctgcaggaaattaacagagtctacaaggaaatgtacaagactgatctggagaaggacattatttcggacacatctggtgacttccgcaagctgatggttgccctggcaaagggtagaagagcagaggatggctctgtcattgattatgaactgattgaccaagatgctcgggatctctatgacgctggagtgaagaggaaaggaactgatgttcccaagtggatcagcatcatgaccgagcggagcgtgccccacctccagaaagtatttgataggtacaagagttacagcccttatgacatgttggaaagcatcaggaaagaggttaaaggagacctggaaaatgctttcctgaacctggttcagtgcattcagaacaagcccctgtattttgctgatcggctgtatgactccatgaagggcaaggggacgcgagataaggtcctgatcagaatcatggtctcccgcagtgaagtggacatgttgaaaattaggtctgaattcaagagaaagtacggcaagtccctgtactattatatccagcaagacactaagggcgactaccagaaagcgctgctgtacctgtgtggtggagatgactgaagcccgacacggcctgagcgtccagaaatggtgctcaccatgcttccagctaacaggtctagaaaaccagcttgcgaataacagtccccgtggccatccctgtgagggtgacgttagcattacccccaacctcattttagttgcctaagcattgcctggccttcctgtctagtctctcctgtaagccaaagaaatgaacattccaaggagttggaagtgaagtctatgatgtgaaacactttgcctcctgtgtactgtgtcataaacagatgaataaactgaatttgtacttt

SEQ ID NO: 307 - DNA, 3646 bp, Homo sapiens
gcccagcaccccaaggcggccaacgccaaaactctccctcctcctcttcctcaatctcgctctcgctctttttttttttcgcaaaaggaggggagagggggtaaaaaaatgctgcactgtgcggcgaagccggtgagtgagcggcgcggggccaatcagcgtgcgccgttccgaaagttgccttttatggctcgagcggccgcggcggcgccctataaaacccagcggcgcgacgcgccaccaccgccgagaccgcgtccgcccgcgagcacagagcctcgcctttgccgatccgccgcccgtccacacccgccgccaggtaagcccggccagccgaccggggcatgcggccgcggcccttcgcccgtgcagagccgccgtctgggccgcagcggggggcgcatggggcggaaccggaccgccgtggggggcgcgggagaagcccctgggcctccggagatgggggacaccccacgccagttcgcaggcgcgaggccgcgctcgggcgggcgcgctccgggggtgccgctctcggggcgggggcaaccggcggggtctttgtctgagccgggctcttgccaatggggatcgcacggtgggcgcggcgtagcccccgtcaggcccggtgggggctggggcgccatgcgcgtgcgcgctggtcctttgggcgctaactgcgtgcgcgctgggaattggcgctaattgcgcgtgcgcgctgggactcaatggcgctaatcgcgcgtgcgttctggggcccgggcgcttgcgccacttcctgcccgagccgctggcgcccgagggtgtggccgctgcgtgcgcgcgcgcgacccggtcgctgtttgaaccgggcggaggcggggctggcgcccggttgggagggggttggggcctggcttcctgccgcgcgccgcggggacgcctccgaccagtgtttgccttttatggtaataacgcggccggcccggcttcctttgtccccaatctgggcgcgcgccggcgccccctggcggcctaaggactcggcgcgccggaagtggccagggcgggggcgacttcggctcacagcgcgcccggctattctcgcagctcaccatggatgatgatatcgccgcgctcgtcgtcgacaacggctccggcatgtgcaaggccggcttcgcgggcgacgatgccccccgggccgtcttcccctccatcgtggggcgccccaggcaccaggtaggggagctggctgggtggggcagccccgggagcgggcgggaggcaagggcgctttctctgcacaggagcctcccggtttccggggtgggctgcgcccgtgctcagggcttcttgtcctttccttcccagggcgtgatggtgggcatgggtcagaaggattcctatgtgggcgacgaggcccagagcaagagaggcatcctcaccctgaagtaccccatcgagcacggcatcgtcaccaactgggacgacatggagaaaatctggcaccacaccttctacaatgagctgcgtgtggctcccgaggagcaccccgtgctgctgaccgaggcccccctgaaccccaaggccaaccgcgagaagatgacccaggtgagtggcccgctacctcttctggtggccgcctccctccttcctggcctcccggagctgcgccctttctcactggttctctcttctgccgttttccgtaggactctcttctctgacctgagtctcctttggaactctgcaggttctatttgctttttcccagatgagctctttttctggtgtttgtctctctgactaggtgtctgagacagtgttgtgggtgtaggtactaacactggctcgtgtgacaaggccatgaggctggtgtaaagcggccttggagtgtgtattaagtaggcgcacagtaggtctgaacagactccccatcccaagaccccagcacacttagccgtgttctttgcactttctgcatgtcccccgtctggcctggctgtccccagtggcttccccagtgtgacatggtgcatctctgccttacagatcatgtttgagaccttcaacaccccagccatgtacgttgctatccaggctgtgctatccctgtacgcctctggccgtaccactggcatcgtgatggactccggtgacggggtcacccacactgtgcccatctacgaggggtatgccctcccccatgccatcctgcgtctggacctggctggccgggacctgactgactacctcatgaagatcctcaccgagcgcggctacagcttcaccaccacggccgagcgggaaatcgtgcgtgacattaaggagaagctgtgctacgtcgccctggacttcgagcaagagatggccacggctgcttccagctcctccctggagaagagctacgagctgcctgacggccaggtcatcaccattggcaatgagcggttccgctgccctgaggcactcttccagccttccttcctgggtgagtggagactgtctcccggctctgcctgacatgagggttacccctcggggctgtgctgtggaagctaagtcctgccctcatttccctctcaggcatggagtcctgtggcatccacgaaactaccttcaactccatcatgaagtgtgacgtggacatccgcaaagacctgtacgccaacacagtgctgtctggcggcaccaccatgtaccctggcattgccgacaggatgcagaaggagatcactgccctggcacccagcacaatgaagatcaaggtgggtgtctttcctgcctgagctgacctgggcaggtcagctgtggggtcctgtggtgtgtggggagctgtcacatccagggtcctcactgcctgtccccttccctcctcagatcattgctcctcctgagcgcaagtactccgtgtggatcggcggctccatcctggcctcgctgtccaccttccagcagatgtggatcagcaagcaggagtatgacgagtccggcccctccatcgtccaccgcaaatgcttctaggcggactatgacttagttgcgttacaccctttcttgacaaaacctaacttgcgcagaaaacaagatgagattggcatggctttatttgttttttttgttttgttttggttttttttttttttttggcttgactcaggatttaaaaactggaacggtgaaggtgacagcagtcggttggagcgagcatcccccaaagttcacaatgtggccgaggactttgattgcattgttgtttttttaatagtcattccaaatatgagatgcattgttacaggaagtcccttgccatcctaaaagccaccccacttctctctaaggagaatggcccagtcctctcccaagtccacacaggggaggtgatagcattgctttcgtgtaaattatgtaatgcaaaatttttttaatcttcgccttaatacttttttattttgttttattttgaatgatgagccttcgtgcccccccttccccctttttgtcccccaacttgagatgtatgaaggcttttggtctccctgggagtgggtggaggcagccagggcttacctgtacactgacttgagaccagttgaataaaagtgcacaccttaaaaatgaggccaagtgtgactttgtggtgtggctgggttgggggcagcagagggtg

SEQ ID NO: 308 - DNA, 1652 bp, Homo sapiens
aaaaacatgatgagaagtctataaaaattgtgtgctaccaaagatctgtcttatttggcagctgctgcctcacccacagcttttgatatctaggaggactcttctctcccaaactacctgtcaccatggcccaccgatttccagccctcacccaggagcagaagaaggagctctcagaaattgcccagagcattgttgccaatggaaaggggatcctggctgcagatgaatctgtaggtaccatggggaaccgcctgcagaggatcaaggtggaaaacactgaagagaaccgccggcagttccgagaaatcctcttctctgtggacagttccatcaaccagagcatcgggggtgtgatccttttccacgagaccctctaccagaaggacagccagggaaagctgttcagaaacatcctcaaggaaaaggggatcgtggtgggaatcaagttagaccaaggaggtgctcctcttgcaggaacaaacaaagaaaccaccattcaagggcttgatggcctctcagagcgctgtgctcagtacaagaaagatggtgttgactttgggaagtggcgtgctgtgctgaggattgccgaccagtgtccatccagcctcgctatccaggaaaacgccaacgccctggctcgctacgccagcatctgtcagcagaatggactggtacctattgttgaaccagaggtaattcctgatggagaccatgacctggaacactgccagtatgttactgagaaggtcctggctgctgtctacaaggccctgaatgaccatcatgtttacctggagggcaccctgctaaagcccaacatggtgactgctggacatgcctgcaccaagaagtatactccagaacaagtagctatggccaccgtaacagctctccaccgtactgttcctgcagctgttcctggcatctgctttttgtctggtggcatgagtgaagaggatgccactctcaacctcaatgctatcaacctttgccctctaccaaagccctggaaactaagtttctcttatggacgggccctgcaggccagtgcactggctgcctggggtggcaaggctgcaaacaaggaggcaacccaggaggcttttatgaagcgggccatggctaactgccaggcggccaaaggacagtatgttcacacgggttcttctggggctgcttccacccagtcgctcttcacagcctgctatacctactagggtccaatgcccgccagcctagctccagtgcttctagtaggagggctgaaagggagcaacttttcctccaatcctggaaattcgacacaattagatttgaactgctggaaatacaacacatgttaaatcttaagtacaagggggaaaaaataaatcagttattgaaacataaaaatgaataccaaggacctgatcaaatttcacacagcagtttccttgcaacactttcagctccccatgctccagaatacccacccaagaaaataataggctttaaaacaatatcggctcctcatccaaagaacaactgctgattgaaacacctcattagctgagtgtagagaagtgcatcttatgaaacagtcttagcagtggtaggttgggaaggagatagctgcaaccaaaaaagaaataaatattctataaaccttc

SEQ ID NO: 309 - DNA, 947 bp, Homo sapiens
ggctcggggccggggccagcacccacactgggtctccacagcggcatggaggcctgcgtgtcttcactgctggtgctggccctgggggccctgtcagtaggcagctcctttgggacccagatcatcgggggccgggaggtgatcccccactcgcgcccgtacatggcctcactgcagagaaatggctcccacctgtgcgggggtgtcctggtgcacccaaagtgggtgctgacggctgcccactgcctggcccagcggatggcccagctgaggctggtgctggggctccacaccctggacagccccggtctcaccttccacatcaaggcagccatccagcaccctcgctacaagcccgtccctgccctggagaacgacctcgcgctgcttcagctggacgggaaagtgaagcccagccggaccatccggccgttggccctgcccagtaagcgccaggtggtggcagcagggactcggtgcagcatggccggctgggggctgacccaccagggcgggcgcctgtcccgggtgctgcgggagctggacctccaagtgctggacacccgcatgtgtaacaacagccgcttctggaacggcagcctctcccccagcatggtctgcctggcggccgactccaaggaccaggctccctgcaagggtgactcgggcgggcccctggtgtgtggcaaaggccgggtgttggccggagtcctgtccttcagctccagggtctgcactgacatcttcaagcctcccgtggccaccgctgtggcgccttacgtgtcctggatcaggaaggtcaccggccgatcggcctgatgccctggggtgatggggaccccctcgctgtctccacaggacccttcccctccaggggtgcagtggggtgggtgaggacgggtgggagggacagggagggaccaataaatcataatgaagaaacgctc

SEQ ID NO: 310 - DNA, 3000 bp, Homo sapiens
tccaatttaaaaaggaagtctgctgacgttagttagttaaatttaacatctttttatgtgtaacacttgactttggaagcaaaaatgaactttgcggagagagagggctctaagagatactgcattcaaacgaaacatgtggccattctctgtgcggtggtggtgggtgtaggattaatagtgggacttgccgtgggcttgaccagatcgtgtgactccagcggggacggcgggccgggcactgcgccagctccttcccacctgccttcttccacggccagcccctcaggtcctcctgcccaggaccaggacatctgcccggccagtgaggatgagagcggacagtggaaaaactttcgactgccggacttcgtcaacccagtccactacgacctgcacgtgaagcccctgttggaggaggacacctacacgggcaccgtgagcatctccatcaacctgagcgctcccacccggtacctgtggctgcacctccgggagaccaggatcacccggctcccggagctgaagaggccctctggggaccaggtgcaagtccggaggtgtttcgagtacaaaaagcaggagtacgtggtggtcgaggcggaggaagagcttacccccagcagtggagatggcctgtatctcctgaccatggagttcgccggctggctgaacggctccctcgtgggattttatagaaccacctacacggagaacggacaagtcaagagcatagtggccaccgatcatgaaccaacagatgccaggaaatcttttccttgttttgatgagcccaacaaaaaggcaacttatacaatatctatcacccatcccaaagaatacggagcactttcaaatatgccagtggcgaaagaagagtcagtggatgataaatggactcgaacaacttttgagaagtctgtccccatgagcacgtacctggtgtgctttgctgtacatcaatttgactctgtaaagagaatatcaaatagtggaaaacctcttacaatttatgtccagccagagcaaaagcacacagccgaatatgctgcaaacataactaaaagtgtgtttgattattttgaagaatactttgctatgaattattctcttcctaaattagataaaatcgctattccagattttggcactggtgccatggagaactggggactcatcacgtacagagaaacgaacctgctttatgaccctaaggaatcagcctcatcaaaccaacagagggtggccactgtggttgcccatgaacttgtgcatcagtggtttggaaatattgtgaccatggactggtgggaagacttgtggctaaatgaaggatttgcttctttctttgagtttctgggagtaaaccatgcagaaacagactggcaaatggtgaccaaatgttacttgaagatgtattacctgttcaagaggatgattctttgatgtcttcgcatccaattattgtgactgtgacaacccctgatgaaataacatctgtttttgatggaatatcctatagcaagggatcttctattttgagaatgcttgaagactggataaaaccagagaattttcaaaaaggatgtcagatgtacttggaaaaataccaattcaagaatgcaaaaacttctgatttttgggcagcactggaagaggcaagtaggctaccagtgaaagaagtaatggacacctggaccagacagatgggttatcctgtgcttaacgtgaacggtgtcaagaacatcacacagaaacgctttttgttggacccaagagctaacccttctcagcccccttcagatcttggttatacatggaatatcccagttaaatggactgaagataatataacaagcagtgtgttatttaataggtcagaaaaagaaggaatcactttgaactcctctaatcctagtggaaatgcttttctcaaaataaacccagatcatattgggttttatcgtgtaaattatgaagtagcaacttgggactcgatagctacagcgctctccttgaaccacaagacattttcttcagcagatcgtgcaagtcttattgatgatgcttttgccttggcaagagctcaacttctagattataaggtggctttgaacttgaccaagtatctcaaaagggaagagaattttttaccatggcagagagtaatttcagctgtaacctacatcattagcatgtttgaagatgataaagagctatatcctatgattgaggaatacttccaaggtcaagtgaagcctattgcagattctctgggatggaatgatgctggagaccatgtcacaaagttactccgttcctccgtgttagggtttgcgtgcaagatgggagacagagaagccttgaacaatgcttcctcgttatttgagcagtggctaaatgggactgtaagccttcccgtaaatctcaggcttctggtgtatcggtatgggatgcagaactctggcaatgagatttcatggaactacactcttgagcaataccagaaaacttcattagctcaagaaaaagaaaaactgctgtatggattagcatcagtgaagaacgttactcttttgtcaaggtatttggatttgctcaaggacacgaaccttattaaaactcaggatgtgtttacagtcattcgatatatctcatataacagctatgggaagaacatggcctggaattggatacaactcaactgggactatctagtcaacagatatacactcaataacagaaaccttggccgaattgtcacaatagcagagccattcaacactgaactgcaactgtggcagatggagagcttttttgcaaaatatccacaagctggagcaggagaaaaacctagggaacaagtgctggaaacagtgaaaaacaatatagagtggctaaaacaacatagaaacaccatcagagaatggttttttaatttacttgagagtggttaatgtattcaaatgttagagtttaattttgtgaatctattgtttc

SEQ ID NO: 311 - DNA, 1856 bp, Homo sapiens
gggagaaccgttcgcggaggaaaggcgaactagtgttgggatggccaccaactgggggagcctcttgcaggataaacagcagctagaggagctggcacggcaggccgtggaccgggccctggctgagggagtattgctgaggacctcacaggagcccacttcctcggaggtggtgagctatgccccattcacgctcttcccctcactggtccccagtgccctgctggagcaagcctatgctgtgcagatggacttcaacctgctagtggatgctgtcagccagaacgctgccttcctggagcaaactctttccagcaccatcaaacaggatgactttaccgctcgtctctttgacatccacaagcaagtcctaaaagagggcattgcccagactgtgttcctgggcctgaatcgctcagactacatgttccagcgcagcgcagatggctccccagccctgaaacagatcgaaatcaacaccatctctgccagctttgggggcctggcctcccggaccccagctgtgcaccgacatgttctcagtgtcctgagtaagaccaaagaagctggcaagatcctctctaataatcccagcaagggactggccctgggaattgccaaagcctgggagctctacggctcacccaatgctctggtgctactgattgctcaagagaaggaaagaaacatatttgaccagcgtgccatagagaatgagctactggccaggaacatccatgtgatccgacgaacatttgaagatatctctgaaaaggggtctctggaccaagaccgaaggctgtttgtggatggccaggaaattgctgtggtttacttccgggatggctacatgcctcgtcagtacagtctacagaattgggaagcacgtctactgctggagaggtcacatgctgccaagtgcccagacattgccacccagctggctgggactaagaaggtgcagcaggagctaagcaggccgggcatgctggagatgttgctccctggccagcctgaggctgtggcccgcctccgcgccacctttgctggcctctactcactggatgtgggtgaagaaggggaccaggccatcgccgaggcccttgctgcccctagccggtttgtgctaaagccccagagagagggtggaggtaacaacctatatggggaggaaatggtacaggccctgaaacagctgaaggacagtgaggagagggcctcctacatcctcatggagaagatcgaacctgagccttttgagaattgcctgctacggcctggcagccctgcccgagtggtccagtgcatttcagagctgggcatctttggggtctatgtcaggcaggaaaagacactcgtgatgaacaagcacgtggggcatctacttcgaaccaaagccatcgagcatgcagatggtggtgtggcagcgggagtggcagtcctggacaacccataccctgtgtgagggcacaaccaggccacgggaccttctatcctctgtatttgtcattcctctcctagccctcctgaggggtatcctcctaaagacctccaaagtttttatggaagggtaaatactggtaccttcccccagctttccatctgaggaccagaaaagttgtgtctcccttagatgagatctagacgcccccaaatccttgagatgtgggtatagctcagggtaagctgctctgaggtaaaggtccatgaaccctgccccactcctgtcagcccctcatcagccttttcagcaggttccagtgcctgacttgggataggactgagtggtaggaggagggggagtggaggggcatagcctttccctaattctgccttaaataaaactgcattgctgt

SEQ ID NO: 312 - DNA, 2579 bp, Homo sapiens
aatatgaaaatcacctcggagctggtaaaaagaggcttaacccctgtctttagatttacagtccaatgcttcactcagccattttacctcacccccactgatgttcgccgaccgttgactattctctacaaaccacaaagacattggaacactatacctattattcggcgcatgagctggagtcctaggcacagctctaagcctccttattcgagccgaactgggccagccaggcaaccttctaggtaacgaccacatctacaacgttatcgtcacagcccatgcatttgtaataatcttcttcatagtaatacccatcataatcggaggctttggcaactgactagttcccctaataatcggtgcccccgatatggcgtttccccgcataaacaacataagcttctgactcttacccccctctctcctactcctgcttgcatctgctatagtggaggccggcgcaggaacaggttgaacagtctaccctcccttggcagggaactactcccaccctggagcctccgtagacctaaccatcttctccttacacctagcaggtatctcctctatcttaggagccatcaatttcatcacaacaattattaatataaaaccccctgccataacccaataccaaacgccccttttcgtctgatccgtcctaatcacagcagtcttacttctcctatctctcccagtcctagccgctggcatcactatactactaacagaccgtaacctcaacaccaccttcttcgacccagccggaggaggagaccccattctataccaacacctattctgatttttcggtcaccctgaagtttatattctcatcctaccaggcttcggaataatctcccatattgtaacttactactccggaaaaaaagaaccatttggatacataggtatggtctgagctatgatatcaattggcttcctagggtttatcgtgtgagcacaccatatatttacagtaggaatagacgtagacacacgagcatatttcacctccgctaccataatcatcgctatccccaccggcgtcaaagtatttagctgactcgccacactccacggaagcaatatgaaatgatctgctgcagtgctctgagccctaggatttatttttcttttcaccgtaggtggcctgactggcattgtattagcaaactcatcactagacatcgtactacacgacacgtactacgttgtagcccacttccactatgtcctatcaataggagctgtatttgccatcataggaggcttcattcactgatttcccctattctcaggctacaccctagaccaaacctacgccaaaatccatttcgctatcatattcatcggcgtaaatctaactttcttcccacaacactttctcggcctatccggaatgccccgacgttactcggactatcccgatgcatacaccacatgaaatatcctatcatctgtaggctcattcatttctctaacagcagtaatattaataattttcataatttgagaagccttcgcttcgaagcgaaaagtcctaatagtagaagaaccctccataaacctggagtgactatatggatgccccccaccctaccacacattcgaagaacccgtatacataaaatctagacaaaaaaggaaggaatcgaaccccccaaagctggtttcaagccaaccccatggcctccatgactttttcaaaaagatattagaaaaaccatttcataactttgtcaaagttaaattataggctaaatcctatatatcttaatggcacatgcagcgcaagtaggtctacaaaacgctacttcccctatcatagaagagcttatcatctttcatgatcacgccctcataatcattttccttatctgcttcctagtcctgtacgcccttttcctaacactcacaacaaaactaactaatactaacatctcagacgctcaggaaatagaaaccgtctgaactatcctgcccgccatcatcctagtccttatcgccctcccatccctacgcatcctttacataacagacgaggtcaacgatccctcctttaccatcaaatcaattggccatcaatggtactgaacctacgaatacaccgactacggcggactaatcttcaactcctacatacttcccccattattcctagaaccaggcgacctgcgactccttgacgttgacaatcgagtagtactcccggttgaagcccccattcgtataataattacatcacaagacgtcttacactcatgagctgtccccacattaggcttaaaaacagatgcaattcccggacgtctaaaccaaaccactttcactgctacacgaccaggggtatactacggccaatgctctgaaatctgtggagcaaaccagttttatgcccatcgtcctagaattaattcccctaaaaatctttgaaatagggcctgtatttaccctatagcaccccctctaccccctctagagcccactgtaaagctaacttagcattaaccttttaagttaaagattaagagaaccaacacctctttacagtgaaatgccccaactaaatacta

SEQ ID NO: 313 - DNA, 381 bp, Homo sapiens
atgcatctctcccagctgctggcctgcgccctgctgctcacgctgctctccctccggccctccgaagccaagcccggggcgccgccgaaggtcccgcgaaccccgccggcagaggagctggccgagccgcaggctgcgggcggcggtcagaagaagggcgacaaggctcccgggggcgggggcgccaatctcaagggcgaccggtcgcgactgctccgggacctgcgcgtggacaccaagtcgcgggcagcgtgggctcgccttctgcaagagcaccccaacgcgcgcaaatacaaaggagccaacaagaagggcttgtccaagggctgcttcggcctcaagctggaccgaatcggctccatgagcggcctgggatgttag

SEQ ID NO: 314 - DNA, 1020 bp, Homo sapiens
taacacagactcagctgccagagcctgctcttaacacctgtgtttccttttcagatcttacaggtgaacaaggtgatgtccatcttgttttatgtgatatttctcgcttatctccgtggcatccaaggtaacaacatggatcaaaggagtttgccagaagactcgctcaattccctcattattaagctgatccaggcagatattttgaaaaacaagctctccaagcagatggtggacgttaaggaaaattaccagagcaccctgcccaaagctgaggctccccgagagccggagcggggagggcccgccaagtcagcattccagccggtgattgcaatggacaccgaactgctgcgacaacagagacgctacaactcaccgcgggtcctgctgagcgacagcacccccttggagcccccgcccttgtatctcatggaggattacgtgggcagccccgtggtggcgaacagaacatcacggcggaaacggtacgcggagcataagagtcaccgaggggagtactcggtatgtgacagtgagagtctgtgggtgaccgacaagtcatcggccatcgacattcggggacaccaggtcacggtgctgggggagatcaaaacgggcaactctcccgtcaaacaatatttttatgaaacgcgatgtaaggaagccaggccggtcaaaaacggttgcaggggtattgatgataaacactggaactctcagtgcaaaacatcccaaacctacgtccgagcactgacttcagagaacaataaactcgtgggctggcggtggatacggatagacacgtcctgtgtgtgtgccttgtcgagaaaaatcggaagaacatgaattggcatctctccccatatataaattattactttaaattatatgatatgcatgtagcatataaatgtttatattgtttttatatattataagttgacctttatttattaaacttcagcaaccctacagtatataagcttttttctcaataaaatcagtgtgcttgccttc

SEQ ID NO: 315 - DNA, 3705 bp, Homo sapiens
atggcgggcgcccagcccggcgtccacgcgctgcagttggagccgcccaccgtggtggagaccctgcggcgcgggagtaagttcatcaaatgggacgaggagacctccagtcggaacctggtgaccctgcgtgtggaccccaatggcttcttcttgtactggacgggccccaacatggaggtggacacactggacatcagttccatcagggacacacggacaggccggtacgcccgcctgcccaaggaccccaagatccgggaagttctgggctttgggggtcccgatgcccggctggaggagaagctgatgacggtggtgtctgggccagacccggtgaacacagtgttcttgaacttcatggccgtgcaggatgacacagccaaggtctggtctgaggagctattcaagctggctatgaacatcctggctcagaacgcctcccggaacaccttcctgcgcaaagcatacacgaagctgaagctgcaggtgaaccaggatggtcggatccccgtcaagaacatcctgaagatgttctcagcagacaagaagcgggtggagactgcgctggaatcctgtggcctcaaattcaaccggagtgagtccatccggcctgatgagttttccttggaaatctttgagcggttcctgaacaagctgtgtctgcggccggacattgacaagatcctgctggagataggcgccaagggcaagccatacctgacgctggagcagctcatggacttcatcaaccagaagcaacgcgacccgagactcaacgaagtgctgtacccgcccctgcggccctcccaggcccggctgctcatcgaaaagtatgagcccaaccagcagtttctggagcgagaccagatgtccatggagggctttagccgctacctgggaggcgaggagaatggcatcctgcccctggaagccctggatctgagcacggacatgacccagccactgagtgcctacttcatcaactcctcgcataacacctatctcactgcggggcagctggctgggacctcgtcggtggagatgtaccgccaggcactactatggggctgccgctgcgtggagctggacgtgtggaagggacggccgcctgaggaggaacccttcattacccacggcttcaccatgaccacagaggtgcctctgcgcgacgtgctggaggccattgccgagactgccttcaagacctcgccctaccccgtcatcctctccttcgagaaccatgtggactcggcaaagcaacaggcaaagatggctgagtactgccgctccatctttggagacgcgctactcatcgagcctctggacaagtacccgctggccccaggcgttcccctgcccagcccccaggacctgatgggccgtatcctggtgaagaacaagaagcggcaccgacccagcgcaggtggcccagacagcgccgggcgcaagcggcccctggagcagagcaattctgccctgagcgagagctccgcggccaccgagccctcctccccgcagctggggtctcccagctctgacagctgcccaggcctgagcaatggggaggaggtagggcttgagaagcccagcctggagcctcagaagtctctgggtgacgagggcctgaaccgaggcccctatgttcttggacctgctgaccgtgaggatgaggaggaagatgaggaagaggaggaacagacagaccccaaaaagccaactacagatgagggcacagccagcagcgaggtgaatgccactgaggagatgtccacgcttgtcaactacatcgaacctgtcaagttcaagtcctttgaggctgctcgaaagaggaacaaatgcttcgagatgtcgtcctttgtggagaccaaggccatggagcaactgaccaagagccccatggagtttgtggaatacaacaagcagcagctcagccgcatctaccccaagggcacccgcgtggactcctccaactacatgccccagctcttctggaacgtagggtgccagcttgttgcgctcaacttccagaccctcgatgtggcgatgcagctcaacgcgggcgtttttgagtacaacgggcgcagcgggtacctgctcaagccggagttcatgcggcggccggacaagtccttcgaccccttcactgaggtcatcgtggatggcatcgtggccaatgccttgcgggtcaaggtgatctcagggcagttcctgtccgacaggaaggtgggcatctacgtggaggtggacatgtttggcctccctgttgatacgcggcgcaagtaccgcacccggacctctcaggggaactcgttcaaccccgtgtgggacgaagagcccttcgacttccccaaggtggtgctgcccacgctggcttcacttcgcattgcagcctttgaggaggggggtaaattcgtagggcaccggatcctgcctgtctctgccatccgctccggataccactacgtctgcctgcggaacgaggccaaccaaccgctgtgcctgccggccctgctcatctacaccgaagcctcggactacattcctgacgaccaccaggactatgcggaggccctgatcaaccccattaagcacgtcagcctgatggaccagagggcccggcagctggccgccctcattggggagagtgaggctcaggctggccaagagacgtgccaggacacccagtctcagcagctggggtctcagccgtcctcaaaccccacccccagcccactggatgcctccccccgccggccccctggccccaccacctcccctgccagcacctccctcagcagcccagggcagcgtgatgatctcatcgccagcatcctctcagaggtggcccccaccccgctggatgagctccgaggtcacaaggctctggtcaagctccggagccggcaagagcgagacctgcgggagctgcgcaagaagcatcagcggaaggcagtcaccctcacccgccgcctgctggatggcctggctcaggcacaggctgagggcaggtgccggctgcggccaggtgccctaggtggggccgctgatgtggaggacacgaaggagggggaggacgaggcaaagcggtatcaggagttccagaacagacaggtgcagagcctgctggagctgcgggaggcccaggtggacgcagaggcccagcggaggctggaacacctgagacaggctctgcagcggctcagggaggtcgtccttgatgcaaacacaactcagttcaagaggctgaaagagatgaacgagagggagaagaaggagctgcagaagatcctggacagaaagcgccataacagcatctcggaggccaagatgagggacaagcataagaaggaggcggaactgacggagattaaccgtcggcacatcactgagtcagtcaactccatccgtcggctggaggaggcccagaagcagcggcatgaccgtcttgtggctgggcagcagcaggtcctgcaacagctggcagaagaggagcccaagctgctggcccagctggcccaggagtgtcaggagcagcgggcgaggctcccccaggagatccgccggagcctgctgggcgagatgccggaggggctgggggacgggcctctggtggcctgtgccagcaacggtcacgcacccgggagcagcgggcacctgtcgggcgctgactcggagagccaggaggagaacacgcagctctga

SEQ ID NO: 316 - DNA, 599 bp, Homo sapiens
tctcctgccacagctcctcaccccctgaaaatgttcgcctgctccaagtttgtctccactccctccttggtcaagagcacctcacagctgctgagccgtccgctatctgcagtggtgctgaaacgaccggagatactgacagatgagagcctcagcagcttggcagtctcatgtccccttacctcacttgtctctagccgcagcttccaaaccagcgccatttcaagggacatcgacacagcagccaagttcattggagctggggctgccacagttggggtggctggttctggggctgggattggaactgtgtttgggagcctcatcattggttatgccaggaacccttctctgaagcaacagctcttctcctacgccattctgggctttgccctctcggaggccatggggctcttttgtctgatggtagcctttctcatcctctttgccatgtgaaggagccgtctccacctcccatagttctcccgcgtctggttggccccgtgtgttccttttcctatacctccccaggcagcctggggaacgtggttggctcagggtttgacagagaaaagacaaataaatactgtattaataag

SEQ ID NO: 317 - DNA, 3069 bp, Homo sapiens
tgtttccgctgcatccagacttcctcaggcggtggctggaggctgcgcatctggggctttaaacatacaaagggattgccaggacctgcggcggcggcggcggcggcgggggctggggcgcgggggccggaccatgagccgctgagccgggcaaaccccaggccaccgagccagcggaccctcggagcgcagccctgcgccgcggaccaggctccaaccaggcggcgaggcggccacacgcaccgagccagcgacccccgggcgacgcgcggggccagggagcgctacgatggaggcgctaatggcccggggcgcgctcacgggtcccctgagggcgctctgtctcctgggctgcctgctgagccacgccgccgccgcgccgtcgcccatcatcaagttccccggcgatgtcgcccccaaaacggacaaagagttggcagtgcaatacctgaacaccttctatggctgccccaaggagagctgcaacctgtttgtgctgaaggacacactaaagaagatgcagaagttctttggactgccccagacaggtgatcttgaccagaataccatcgagaccatgcggaagccacgctgcggcaacccagatgtggccaactacaacttcttccctcgcaagcccaagtgggacaagaaccagatcacatacaggatcattggctacacacctgatctggacccagagacagtggatgatgcctttgctcgtgccttccaagtctggagcgatgtgaccccactgcggttttctcgaatccatgatggagaggcagacatcatgatcaactttggccgctgggagcatggcgatggatacccctttgacggtaaggacggactcctggctcatgccttcgccccaggcactggtgttgggggagactcccattttgatgacgatgagctatggaccttgggagaaggccaagtggtccgtgtgaagtatggcaacgccgatggggagtactgcaagttccccttcttgttcaatggcaaggagtacaacagctgcactgatactggccgcagcgatggcttcctctggtgctccaccacctacaactttgagaaggatggcaagtacggcttctgtccccatgaagccctgttcaccatgggcggcaacgctgaaggacagccctgcaagtttccattccgcttccagggcacatcctatgacagctgcaccactgagggccgcacggatggctaccgctggtgcggcaccactgaggactacgaccgcgacaagaagtatggcttctgccctgagaccgccatgtccactgttggtgggaactcagaaggtgccccctgtgtcttccccttcactttcctgggcaacaaatatgagagctgcaccagcgccggccgcagtgacggaaagatgtggtgtgcgaccacagccaactacgatgacgaccgcaagtggggcttctgccctgaccaagggtacagcctgttcctcgtggcagcccacgagtttggccacgccatggggctggagcactcccaagaccctggggccctgatggcacccatttacacctacaccaagaacttccgtctgtcccaggatgacatcaagggcattcaggagctctatggggcctctcctgacattgaccttggcaccggccccacccccacactgggccctgtcactcctgagatctgcaaacaggacattgtatttgatggcatcgctcagatccgtggtgagatcttcttcttcaaggaccggttcatttggcggactgtgacgccacgtgacaagcccatggggcccctgctggtggccacattctggcctgagctcccggaaaagattgatgcggtatacgaggccccacaggaggagaaggctgtgttctttgcagggaatgaatactggatctactcagccagcaccctggagcgagggtaccccaagccactgaccagcctgggactgccccctgatgtccagcgagtggatgccgcctttaactggagcaaaaacaagaagacatacatctttgctggagacaaattctggagatacaatgaggtgaagaagaaaatggatcctggctttcccaagctcatcgcagatgcctggaatgccatccccgataacctggatgccgtcgtggacctgcagggcggcggtcacagctacttcttcaagggtgcctattacctgaagctggagaaccaaagtctgaagagcgtgaagtttggaagcatcaaatccgactggctaggctgctgagctggccctggctcccacaggcccttcctctccactgccttcgatacaccgggcctggagaactagagaaggacccggaggggcctggcagccgtgccttcagctctacagctaatcagcattctcactcctacctggtaatttaagattccagagagtggctcctcccggtgcccaagaatagatgctgactgtactcctcccaggcgccccttccccctccaatcccaccaaccctcagagccacccctaaagagatcctttgatattttcaacgcagccctgctttgggctgccctggtgctgccacacttcaggctcttctcctttcacaaccttctgtggctcacagaacccttggagccaatggagactgtctcaagagggcactggtggcccgacagcctggcacagggcagtgggacagggcatggccaggtggccactccagacccctggcttttcactgctggctgccttagaacctttcttacattagcagtttgctttgtatgcactttgtttttttctttgggtcttgttttttttttccacttagaaattgcatttcctgacagaaggactcaggttgtctgaagtcactgcacagtgcatctcagcccacatagtgatggttcccctgttcactctacttagcatgtccctaccgagtctcttctccactggatggaggaaaaccaagccgtggcttcccgctcagccctccctgcccctcccttcaaccattccccatgggaaatgtcaacaagtatgaataaagacacctactgagtggc

SEQ ID NO: 318 - DNA, 737 bp, Homo sapiens
ggagtttcgccgccgcagtcttcgccaccatgccgccctacaccgtggtctatttcccagttcgaggccgctgcgcggccctgcgcatgctgctggcagatcagggccagagctggaaggaggaggtggtgaccgtggagacgtggcaggagggctcactcaaagcctcctgcctatacgggcagctccccaagttccaggacggagacctcaccctgtaccagtccaataccatcctgcgtcacctgggccgcacccttgggctctatgggaaggaccagcaggaggcagccctggtggacatggtgaatgacggcgtggaggacctccgctgcaaatacatctccctcatctacaccaactatgaggcgggcaaggatgactatgtgaaggcactgcccgggcaactgaagccttttgagaccctgctgtcccagaaccagggaggcaagaccttcattgtgggagaccagatctccttcgctgactacaacctgctggacttgctgctgatccatgaggtcctagcccctggctgcctggatgcgttccccctgctctcagcatatgtggggcgcctcagcgcccggcccaagctcaaggccttcctggcctcccctgagtacgtgaacctccccatcaatggcaacgggaaacagtgagggttggggggactctgagcgggaggcagagtttgccttcctttctccaggaccaataaaatttctaagagagct

SEQ ID NO: 319 - DNA, 1836 bp, Homo sapiens
cgcgcgagtctcaggtcccgctaattacctggcgggtgctgcccacccctgccctcgcgcacctagcgcggtggcaggcgggaaggcggggcctgggggagccccacccctggagactgcggctggggcctccctctcctccgcccgcccgcctgccactagctcattgcgcctctcctgcagtctgattggcaccggctcccattccggctccagcctccaatccgacccccatttcggctgcagcctcggacctagctccggccctcggtctatccggttgcatcctccctccctgttccggatcttatcttgcgccagcgcctactccaggatcccgtagccagacctcaagccatggctggtcccttctcccgtctgctgtccgcccgcccgggactcaggctcctggctttggccggagcggggtctctagccgctgggtttctgctccgaccggaacctgtacgagctgccagtgaacgacggaggctgtatcccccgagccagacatggccaactggacagctcccaggtaactgcactaggtctaggcgtctgtgccctccctccatggttactgggtaccccctccccagcgctgagtacccagacctccgaaagcacaacaactgcatggccagtcacctgaccccagcagtctatgcacggctctgcgacaagaccacacccactggttggacgctagatcagtgtatccagactggcgtggacaaccctggccaccccttcatcaagactgtgggcatggtggctggagatgaggagacctatgaggtatttgctgacctgtttgaccctgtgatccaagagcgacacaatggatatgacccccggacaatgaagcacaccacggatctagatgccagtaaaatccgttctggctactttgatgagaggtatgtattgtcctctagagtcagaactggccgaagcatccgaggactcagtctgcctccagcttgcactcgagcagagcgacgagaggtggaacgtgttgtggtggatgcactgagtggcctgaagggtgacctggctggacgttactataggctcagtgagatgacagaggctgaacagcagcagcttattgatgaccactttctgtttgataagcctgtgtccccgttgctgactgcagcaggaatggctcgagactggccagatgctcgtggaatttggcacaacaatgagaagagcttcctgatctgggtgaatgaggaggatcatacacgggtgatctccatggagaagggtggtaacatgaagagagtgtttgaaagattctgccgaggcctcaaagaggtggagagacttatccaagaacgtggctgggagttcatgtggaatgagcgtttgggatacatcttgacctgtccatctaacctgggcactggacttcgggcaggagtgcacatcaaactgcccctgctaagcaaagatagccgcttcccaaagatcctggagaacctaagactccaaaaacgtggtactggaggagtggacactgctgctacaggcggtgtctttgatatttctaatttggaccgactaggcaaatcagaggtggagctggtgcaactggtcatcgatggagtaaactatttgattgattgtgaacggcgtctggagagaggccaggatatccgcatccccacacctgtcatccacaccaagcattaactccccatcgccagctgatgactcaagattcccaggagttctgctcattctaatgatggcccattctacttgctctggacctgcccccgcatcccctgcctccatcctagtaaagactccttgctatgctgc

SEQ ID NO: 320 - DNA, 489 bp, Homo sapiens
agagccgcaggtcagtcgtgaagagggagctctattgccaccatgagtttctccggcaagtaccaactgcagagccaggaaaactttgaagccttcatgaaggcaatcggtctgccggaagagctcatccagaaggggaaggatatcaagggggtgtcggaaatcgtgcagaatgggaagcacttcaagttcaccatcaccgctgggtccaaagtgatccaaaacgaattcacggtgggggaggaatgtgagctggagacaatgacaggggagaaagtcaagacagtggttcagttggaaggtgacaataaactggtgacaactttcaaaaacatcaagtctgtgaccgaactcaacggcgacataatcaccaataccatgacattgggtgacattgtcttcaagagaatcagcaagagaatttaaacaagtctgcatttcatattattttagtgtgtaaaattaatgtaataaagtgaactttgtttt

SEQ ID NO: 321 - DNA, 1825 bp, Homo sapiens
gcggcccgcgtcgaccgagcgcacgccgagcccgtccgccgccgccatggccaccacggtgacctgcacccgcttcaccgacgagtaccagctctacgaggatattggcaagggggctttctctgtggtccgacgctgtgtcaagctctgcaccggccatgagtatgcagccaagatcatcaacaccaagaagctgtcagccagagatcaccagaagctggagagagaggctcggatctgccgccttgtgaagcattccaacatcgtgcgtctccacgacagcatctccgaggagggcttccactacctggtcttcgatctggtcactggtggggagctctttgaagacattgtggcgagagagtactacagcgaggctgatgccagtcactgtatccagcagatcctgkaggccgttctccattgtcaccaaatgggggtcgtccacagagacctcaagccggagaacctgcttctggccagcaagtgcaaaggggctgcagtgaagctggcagacttcggcctagctatcgaggtgcagggggaccagcaggcatggtttggtttcgctggcacaccaggctacctgtcccctgaggtccttcgcaaagaggcgtacggcaagcccgtggacatctgggcatgtggggtgatcctgtacatcctgctcgtgggctacccacccttctgggacgaggaccagcacaagctgtaccagcagatcaaggctggtgcctatgacttcccgtcccctgagtgggacaccgtcactcctgaagccaaaaacctcatcaaccagatgctgaccatcaaccctgccaagcgcatcacagcccatgaggccctgaagcacccgtgggtctgccaacgctccacggtagcatccatgatgcacagacaggagactgtggagtgtctgaaaaagttcaatgccaggagaaagctcaagggagccatcctcaccaccatgctggccacacggaatttctcagtgggcagacagaccaccgctccggccacaatgtccaccgcggcctccggcaccaccatggggctggtggaacaagccaagagtttactcaacaagaaagcagatggagtcaagccccagacgaatagtaccaaaaacagtgcagccgccaccagccccaaagggacgcttcctcctgccgccctggagcctcaaaccaccgtcatccataacccagtggacgggattaaggagtcttctgacagtgccaataccaccatagaggatgaagacgctaaagcccggaagcaggagatcattaagaccacggagcagctcatcgaggccgtcaacaacggtgactttgaggcctacgcgaaaatctgtgacccagggctgacctcgtttgagcctgaagcactgggcaacctggttgaagggatggacttccacagattctacttcgagaacctgctggccaagaacagcaagccgatccacacgaccatcctgaacccacacgtgcacgtcattggagaggatgccgcctgcatcgcttacatccggctcacgcagtacattgacgggcagggccggccccgcaccagccagtctgaggagacccgcgtgtggcaccgccgcgacggcaagtggcagaacgtgcacttccactgctcgggcgcgcctgtggccccgctgcagtgaagagctgcgccctggtttcgccggacagagttggtgtttggagcccgactgccctcgggcacacggcctgcctgtcgcatgtttgtgtctgcctcgttccctcccctggttcctgtgtctgcagaaaaacaagaccagatgtgatttgtt

SEQ ID NO: 322 - DNA, 2208 bp, Homo sapiens
gaattcatgctaaattgctggaaggctgcgtctctgctgtggtgtcagttccggatgcctcatcgccaggggcgcgccgcagccacccaccctccggaccgcggcagctgctgacccgccatcgccatggcccgcgggaaagccaaggaggagggcagctggaagaaattcatctggaactcagagaagaaggagtttctgggcaggaccggtggcagttggtttaagatccttctattctacgtaatattttatggctgcctggctggcatcttcatcggaaccatccaagtgatgctgctcaccatcagtgaatttaagcccacatatcaggaccgagtggccccgccaggattaacacagattcctcagatccagaagactgaaatttcctttcgtcctaatgatcccaagagctatgaggcatatgtactgaacatagttaggttcctggaaaagtacaaagattcagcccagagggatgacatgatttttgaagattgtggcgatgtgcccagtgaaccgaaagaacgaggagactttaatcatgaacgaggagagcgaaaggtctgcagattcaagcttgaatggctgggaaattgctctggattaaatgatgaaacttatggctacaaagagggcaaaccgtgcattattataaagctcaaccgagttctaggcttcaaacctaagcctcccaagaatgagtccttggagacttacccagtgatgaagtataacccaaatgtccttcccgttcagtgcactggcaagcgagatgaagataaggataaagttggaaatgtggagtattttggactgggcaactcccctggttttcctctgcagtattatccgtactatggcaaactcctgcagcccaaatacctgcagcccctgctggccgtacagttcaccaatcttaccatggacactgaaattcgcatagagtgtaaggcgtacggtgagaacattgggtacagtgagaaagaccgttttcagggacgttttgatgtaaaaattgaagttaagagctgatcacaagcacaaatctttcccactagccatttaataagttaaaaaaagatacaaaaacaaaaacctactagtcttgaacaaactgtcatacgtatgggacctacacttaatctatatgctttacactagctttctgcatttaataggttagaatgtaaattaaagtgtagcaatagcaacaaaatatttattctactgtaaatgacaaaagaaaaagaaaaattgagccttgggacgtgcccatttttactgtaaattatgattccgtaactgaccttgtagtaagcagtgtttctggcccctaagtattgctgccttgtgtattttatttagtgtacagtactacaggtgcatactctggtcatttttcaagccatgttttattgtatctgttttctactttatgtgagcaaggtttgctgtccaaggtgtaaatattcaacgggaataaaactggcatggtaattttttttttttgtttgttttttgttttttggctctttcaaaggtaatggcccatcgatgagcatttttaacatactccatagtcttttcctgtggtgttaggtctttatttttatttttttcctgggggctggggtgggggtttgtcatgggggaactgccctttaaattttaagtgacactacagaaaaacacaaaaaggtgatgggttgtgttatgcttgtattgaatgctgtcttgacatctcttgccttgtcctccggtatgttctaaagctgtgtctgagatctggatctgcccatcactttggcctagggacagggctaattaatttgctttatacattttcttttactttccttttttcctttctggaggcatcacatgctggtgctgtgtctttatgaatgttttaaccattttcatggtggaagaattttatatttatgcagttgtacaattttatttttttctgcaagaaaaagtgtaatgtatgaaataaaccaaagtcacttgtttgaaaataaatctttattttgaactttataaaagcaatgcagtaccccatagactggtgttaaatgttgtctacagtgcaaaatccatgttctaacatatgtaataattgccaggagtacagtgctcttgttgatcttgtattcagtcaggttaaaacaacggacaataaaagaatgaaccgaattc

SEQ ID NO: 323 - protein, 579 aa, Homo sapiens
MVQYELWAALPGASGVALACCFVAAAVALRWSGRRTARGAVVRARQKQRAGLENMDRAAQRFRLQNPDLDSEALLALPLPQLVQKLHSRELAPEAVLFTYVGKAWEVNKGTNCVTSYLADCETQLSQAPRQGLLYGVPVSLKECFTYKGQDSTLGLSLNEGVPAECDSVVVHVLKLQGAVPFVHTNVPQSMFSYDCSNPLFGQTVNPWKSSKSPGGSSGGEGALIGSGGSPLGLGTDIGGSIRFPSSFCGICGLKPTGNRLSKSGLKGCVYGQEAVRLSVGPMARDVESLALCLRALLCEDMFRLDPTVPPLPFREEVYTSSQPLRVGYYETDNYTMPSPAMRRAVLETKQSLEAAGHTLVPFLPSNIPHALETLSTGGLFSDGGHTFLQNFKGDFVDPCLGDLVSILKLPQWLKGLLAFLVKPLLPRLSAFLSNMKSRSAGKLWELQHEIEVYRKTVIAQWRALDLDVVLTPMLAPALDLNAPGRATGAVSYTMLYNCLDFPAGVVPVTTVTAEDEAQMEHYRGYFGDIWDKMLQKGMKKSVGLPVAVQCVALPWQEELCLRFMREVERLMTPEKQSS

SEQ ID NO: 324 - DNA, 4020 bp, Homo sapiens
gccgagcaccgcgcaccgcgtcatgggggccgcctcgggccgccgggggccggggctgctgctgccgctgccgctgctgttgctgctgccgccgcagcccgccctggcgttggaccccgggctgcagcccggcaacttttctgctgacgaggccggggcgcagctcttcgcgcagagctacaactccagcgccgaacaggtgctgttccagagcgtggccgccagctgggcgcacgacaccaacatcaccgcggagaatgcaaggcgccaggaggaagcagccctgctcagccaggagtttgcggaggcctggggccagaaggccaaggagctgtatgaaccgatctggcagaacttcacggacccgcagctgcgcaggatcatcggagctgtgcgaaccctgggctctgccaacctgcccctggctaagcggcagcagtacaacgccctgctaagcaacatgagcaggatctactccaccgccaaggtctgcctccccaacaagactgccacctgctggtccctggacccagatctcaccaacatcctggcttcctcgcgaagctacgccatgctcctgtttgcctgggagggctggcacaacgctgcgggcatcccgctgaaaccgctgtacgaggatttcactgccctcagcaatgaagcctacaagcaggacggcttcacagacacgggggcctactggcgctcctggtacaactcccccaccttcgaggacgatctggaacacctctaccaacagctagagcccctctacctgaacctccatgccttcgtccgccgcgcactgcatcgccgatacggagacagatacatcaacctcaggggacccatccctgctcatctgctgggagacatgtgggcccagagctgggaaaacatctacgacatggtggtgcctttcccagacaagcccaacctcgatgtcaccagtactatgctgcagcagggctggaacgccacgcacatgttccgggtggcagaggagttcttcacctccctggagctctcccccatgcctcccgagttctgggaagggtcgatgctggagaagccggccgacgggcgggaagtggtgtgccacgcctcggcttgggacttctacaacaggaaagacttcaggatcaagcagtgcacacgggtcacgatggaccagctctccacagtgcaccatgagatgggccatatacagtactacctgcagtacaaggatctgcccgtctccctgcgtcggggggccaaccccggcttccatgaggccattggggacgtgctggcgctctcggtctccactcctgaacatctgcacaaaatcggcctgctggaccgtgtcaccaatgacacggaaagtgacatcaattacttgctaaaaatggcactggaaaaaattgccttcctgccctttggctacttggtggaccagtggcgctggggggtctttagtgggcgtacccccccttcccgctacaacttcgactggtggtatcttcgaaccaagtatcaggggatctgtcctcctgttacccgaaacgaaacccactttgatgctggagctaagtttcatgttccaaatgtgacaccatacatcaggtactttgtgagttttgtcctgcagttccagttccatgaagccctgtgcaaggaggcaggctatgagggcccactgcaccagtgtgacatctaccggtccaccaaggcaggggccaagctccggaaggtgctgcaggctggctcctccaggccctggcaggaggtgctgaaggacatggtcggcttagatgccctggatgcccagccgctgctcaagtacttccagccagtcacccagtggctgcaggagcagaaccagcagaacggcgaggtcctgggctggcccgagtaccagtggcacccgccgttgcctgacaactacccggagggcatagacctggtgactgatgaggctgaggccagcaagtttgtggaggaatatgaccggacatcccaggtggtgtggaacgagtatgccgaggccaactggaactacaacaccaacatcaccacagagaccagcaagattctgctgcagaagaacatgcaaatagccaaccacaccctgaagtacggcacccaggccaggaagtttgatgtgaaccagttgcagaacaccactatcaagcggatcataaagaaggttcaggacctagaacgggcagcgctgcctgcccaggagctggaggagtacaacaagatcctgttggatatggaaaccacctacagcgtggccactgtgtgccacccgaatggcagctgcctgcagctcgagccagatctgacgaatgtgatggccacatcccggaaatatgaagacctgttatgggcatgggagggctggcgagacaaggcggggagagccatcctccagttttacccgaaatacgtggaactcatcaaccaggctgcccggctcaatggctatgtagatgcaggggactcgtggaggtctatgtacgagacaccatccctggagcaagacctggagcggctcttccaggagctgcagccactctacctcaacctgcatgcctacgtgcgccgggccctgcaccgtcactacggggcccagcacatcaacctggaggggcccattcctgctcacctgctggggaacatgtgggcgcagacctggtccaacatctatgacttggtggtgcccttcccttcagccccctcgatggacaccacagaggctatgctaaagcagggctggacgcccaggaggatgtttaaggaggctgatgatttcttcacctccctggggctgctgcccgtgcctcctgagttctggaacaagtcgatgctggagaagccaaccgacgggcgggaggtggtctgccacgcctcggcctgggacttctacaacggcaaggacttccggatcaagcagtgcaccaccgtgaacttggaggacctggtggtggcccaccacgaaatgggccacatccagtatttcatgcagtacaaagacttacctgtggccttgagggagggtgccaaccccggcttccatgaggccattggggacgtgctagccctctcagtgtctacgcccaagcacctgcacagtctcaacctgctgagcagtgagggtggcagcgacgagcatgacatcaactttctgatgaagatggcccttgacaagatcgcctttatccccttcagctacctcgtcgatcagtggcgctggagggtatttgatggaagcatcaccaaggagaactataaccaggagtggtggagcctcaggctgaagtaccagggcctctgccccccagtgcccaggactcaaggtgactttgacccaggggccaagttccacattccttctagcgtgccttacatcaggtactttgtcagcttcatcatccagttccagttccacgaggcactgtgccaggcagctggccacacgggccccctgcacaagtgtgacatctaccagtccaaggaggccgggcagcgcctggcgaccgccatgaagctgggcttcagtaggccgtggccggaagccatgcagctgatcacgggccagcccaacatgagcgcctcggccatgttgagctacttcaagccgctgctggactggctccgcacggagaacgagctgcatggggagaagctgggctggccgcagtacaactggacgccgaactccgctcgctcagaagggcccctcccagacagcggccgcgtcagcttcctgggcctggacctggatgcgcagcaggcccgcgtgggccagtggctgctgctcttcctgggcatcgccctgctggtagccaccctgggcctcagccagcggctcttcagcatccgccaccgcagcctccaccggcactcccacgggccccagttcggctccgaggtggagctgagacactcctgaggtgacccggctgggtcggccctgcccaagggcctcccaccagagactgggatgggaacactggtgggcagctgagg

SEQ ID NO: 325 - DNA, 1469 bp, Homo sapiens
agttcccactgcagcgcaggtgagctctcctgaggacctctctgtcagctcccctgattgtagggaggatccagtgtggcaagaaactcctccagcccagcaagcagctcaggatgttcctgaaggccgtggtcctgaccctggccctggtggctgtcgccggagccagggctgaggtcagtgctgaccaggtggccacagtgatgtgggactacttcagccagctgagcaacaatgccaaggaggccgtggaacatctccagaaatctgaactcacccagcaactcaatgccctcttccaggacaaacttggagaagtgaacacttacgcaggtgacctgcagaagaagctggtgccctttgccaccgagctgcatgaacgcctggccaaggactcggagaaactgaaggaggagattgggaaggagctggaggagctgagggcccggctgctgccccatgccaatgaggtgagccagaagatcggggacaacctgcgagagcttcagcagcgcctggagccctacgcggaccagctgcgcacccaggtcaacacgcaggccgagcagctgcggcgccagctgaccccctacgcacagcgcatggagagagtgctgcgggagaacgccgacagcctgcaggcctcgctgaggccccacgccgacgagctcaaggccaagatcgaccagaacgtggaggagctcaagggacgccttacgccctacgctgacgaattcaaagtcaagattgaccagaccgtggaggagctgcgccgcagcctggctccctatgctcaggacacgcaggagaagctcaaccaccagcttgagggcctgaccttccagatgaagaagaacgccgaggagctcaaggccaggatctcggccagtgccgaggagctgcggcagaggctggcgcccttggccgaggacgtgcgtggcaacctgaggggcaacaccgaggggctgcagaagtcactggcagagctgggtgggcacctggaccagcaggtggaggagttccgacgccgggtggagccctacggggaaaacttcaacaaagccctggtgcagcagatggaacagctcaggcagaaactgggcccccatgcgggggacgtggaaggccacttgagcttcctggagaaggacctgagggacaaggtcaactccttcttcagcaccttcaaggagaaagagagccaggacaagactctctccctccctgagctggagcaacagcaggaacagcagcaggagcagcagcaggagcaggtgcagatgctggcccctttggagagctgagctgcccctggtgcactggccccaccctcgtggacacctgccctgccctgccacctgtctgtctgtctgtcccaaagaagttctggtatgaacttgaggacacatgtccagtgggaggtgagaccacctctcaatattcaataaagctgctgagaatctagcctc

SEQ ID NO: 326 - DNA, 4879 bp, Homo sapiens
accaattcgccagcggttcaggtggctcttgcctcgatgtcctagcctaggggcccccgggccggacttggctgggctcccttcaccctctgcggagtcatgagggcgaacgacgctctgcaggtgctgggcttgcttttcagcctggcccggggctccgaggtgggcaactctcaggcagtgtgtcctgggactctgaatggcctgagtgtgaccggcgatgctgagaaccaataccagacactgtacaagctctacgagaggtgtgaggtggtgatggggaaccttgagattgtgctcacgggacacaatgccgacctctccttcctgcagtggattcgagaagtgacaggctatgtcctcgtggccatgaatgaattctctactctaccattgcccaacctccgcgtggtgcgagggacccaggtctacgatgggaagtttgccatcttcgtcatgttgaactataacaccaactccagccacgctctgcgccagctccgcttgactcagctcaccgagattctgtcagggggtgtttatattgagaagaacgataagctttgtcacatggacacaattgactggagggacatcgtgagggaccgagatgctgagatagtggtgaaggacaatggcagaagctgtcccccctgtcatgaggtttgcaaggggcgatgctggggtcctggatcagaagactgccagacattgaccaagaccatctgtgctcctcagtgtaatggtcactgctttgggcccaaccccaaccagtgctgccatgatgagtgtgccgggggctgctcaggccctcaggacacagactgctttgcctgccggcacttcaatgacagtggagcctgtgtacctcgctgtccacagcctcttgtctacaacaagctaactttccagctggaacccaatccccacaccaagtatcagtatggaggagtttgtgtagccagctgtccccataactttgtggtggatcaaacatcctgtgtcagggcctgtcctcctgacaagatggaagtagataaaaatgggctcaagatgtgtgagccttgtgggggactatgtcccaaagcctgtgagggaacaggctctgggagccgcttccagactgtggactcgagcaacattgatggatttgtgaactgcaccaagatcctgggcaacctggactttctgatcaccggcctcaatggagacccctggcacaagatccctgccctggacccagagaagctcaatgtcttccggacagtacgggagatcacaggttacctgaacatccagtcctggccgccccacatgcacaacttcagtgttttttccaatttgacaaccattggaggcagaagcctctacaaccggggcttctcattgttgatcatgaagaacttgaatgtcacatctctgggcttccgatccctgaaggaaattagtgctgggcgtatctatataagtgccaataggcagctctgctaccaccactctttgaactggaccaaggtgcttcgggggcctacggaagagcgactagacatcaagcataatcggccgcgcagagactgcgtggcagagggcaaagtgtgtgacccactgtgctcctctgggggatgctggggcccaggccctggtcagtgcttgtcctgtcgaaattatagccgaggaggtgtctgtgtgacccactgcaactttctgaatggggagcctcgagaatttgcccatgaggccgaatgcttctcctgccacccggaatgccaacccatggagggcactgccacatgcaatggctcgggctctgatacttgtgctcaatgtgcccattttcgagatgggccccactgtgtgagcagctgcccccatggagtcctaggtgccaagggcccaatctacaagtacccagatgttcagaatgaatgtcggccctgccatgagaactgcacccaggggtgtaaaggaccagagcttcaagactgtttaggacaaacactggtgctgatcggcaaaacccatctgacaatggctttgacagtgatagcaggattggtagtgattttcatgatgctgggcggcacttttctctactggcgtgggcgccggattcagaataaaagggctatgaggcgatacttggaacggggtgagagcatagagcctctggaccccagtgagaaggctaacaaagtcttggccagaatcttcaaagagacagagctaaggaagcttaaagtgcttggctcgggtgtctttggaactgtgcacaaaggagtgtggatccctgagggtgaatcaatcaagattccagtctgcattaaagtcattgaggacaagagtggacggcagagttttcaagctgtgacagatcatatgctggccattggcagcctggaccatgcccacattgtaaggctgctgggactatgcccagggtcatctctgcagcttgtcactcaatatttgcctctgggttctctgctggatcatgtgagacaacaccggggggcactggggccacagctgctgctcaactggggagtacaaattgccaagggaatgtactaccttgaggaacatggtatggtgcatagaaacctggctgcccgaaacgtgctactcaagtcacccagtcaggttcaggtggcagattttggtgtggctgacctgctgcctcctgatgataagcagctgctatacagtgaggccaagactccaattaagtggatggcccttgagagtatccactttgggaaatacacacaccagagtgatgtctggagctatggtgtgacagtttgggagttgatgaccttcggggcagagccctatgcagggctacgattggctgaagtaccagacctgctagagaagggggagcggttggcacagccccagatctgcacaattgatgtctacatggtgatggtcaagtgttggatgattgatgagaacattcgcccaacctttaaagaactagccaatgagttcaccaggatggcccgagacccaccacggtatctggtcataaagagagagagtgggcctggaatagcccctgggccagagccccatggtctgacaaacaagaagctagaggaagtagagctggagccagaactagacctagacctagacttggaagcagaggaggacaacctggcaaccaccacactgggctccgccctcagcctaccagttggaacacttaatcggccacgtgggagccagagccttttaagtccatcatctggatacatgcccatgaaccagggtaatcttggggagtcttgccaggagtctgcagtttctgggagcagtgaacggtgcccccgtccagtctctctacacccaatgccacggggatgcctggcatcagagtcatcagaggggcatgtaacaggctctgaggctgagctccaggagaaagtgtcaatgtgtagaagccggagcaggagccggagcccacggccacgcggagatagcgcctaccattcccagcgccacagtctgctgactcctgttaccccactctccccacccgggttagaggaagaggatgtcaacggttatgtcatgccagatacacacctcaaaggtactccctcctcccgggaaggcaccctttcttcagtgggtcttagttctgtcctgggtactgaagaagaagatgaagatgaggagtatgaatacatgaaccggaggagaaggcacagtccacctcatccccctaggccaagttcccttgaggagctgggttatgagtacatggatgtggggtcagacctcagtgcctctctgggcagcacacagagttgcccactccaccctgtacccatcatgcccactgcaggcacaactccagatgaagactatgaatatatgaatcggcaacgagatggaggtggtcctgggggtgattatgcagccatgggggcctgcccagcatctgagcaagggtatgaagagatgagagcttttcaggggcctggacatcaggccccccatgtccattatgcccgcctaaaaactctacgtagcttagaggctacagactctgcctttgataaccctgattactggcatagcaggcttttccccaaggctaatgcccagagaacgtaactcctgctccctgtggcactcagggagcatttaatggcagctagtgcctttagagggtaccgtcttctccctattccctctctctcccaggtcccagccccttttccccagtcccagacaattccattcaatctttggaggcttttaaacattttgacacaaaattcttatggtatgtagccagctgtgcactttcttctctttcccaaccccaggaaaggttttccttattttgtgtgctttcccagtcccattcctcagcttcttcacaggcactcctggagatatgaaggattactctccatatcccttcctctcaggctcttgactacttggaactaggctcttatgtgtgcctttgtttcccatcagactgtcaagaagaggaaagggaggaaacctagcagaggaaagtgtaattttggtttatgactcttaaccccctagaaagacagaagcttaaaatctgtgaagaaagaggttaggagtagatattgattactatcataattcagcacttaactatgagccaggcatcatactaaacttcacctacattatctcacttagtcctttatcatccttaaaacaattctgtgacatacatattatctcattttacacaaagggaagtcgggcatggtggctcatgcctgtaatctcagcactttgggaggctgaggcagaaggattacctgaggcaaggagtttgagaccagcttagccaacatagtaagacccccatctcttt

SEQ ID NO: 327 - protein, 344 aa, Rat
MCTKMEQAFYHDDSYAAAGYGRSPGSLSLHDYKLLKPTLALNLADPYRGLKGPGARGPGPEGSGAGSYFSGQGSDTGASLKLASTELERLIVPNSNGVITTTPTPPGQYFYPRGGGSGGGTGGGVTEEQEGFADGFVKALDDLQKMNHVTPPNVSLGASGGPQAGPGGVYAGPEPPPVYTNLSSYSPASAPSGGSGTAVGTGSSYPTATISYLPHAPPFAGGHPAQLGLSRGASAFKEEPQTVPEARSRDATPPVSPINMEDQERIKVERKRLRNRLAATKCRKRKLERIARLEDKVKTLKAENAGLSSAAGLLREQVAQLKQKVMTHVSNGCQLLLGVKGHAF

SEQ ID NO: 328 - protein, 341 aa, Mouse
METPFYGEEALSGLAAGASSVAGAAGAPGGGGFAPPGRAFPGAPPTSSMLKKDALTLSLAEQGAAGLKPGSATAPSALRPDGAPDGLLASPDLGLLKLASPELERLIIQSNGLVTTTPTSTQFLYPKVAASEEQEFAEGFVKALEDLHKQSQLGAATAATSGAPAPPAPADLAATPGATETPVYANLSSFAGGAGPPGGAATVAFAAEPVPFPPPPGALGPPPPPHPPRLAALKDEPQTVPDVPSFGDSPPLSPIDMDTQERIKAERKRLRNRIAASKCRKRKLERISRLEEKVKTLKSQNTELASTASLLREQVAQLKQKVLSHVNSGCQLLPQHQVPAY

SEQ ID NO: 329 - protein, 770 aa, Rat
MAQWNQLQQLDTRYLEQLHQLYSDSFPMELRQFLAPWIESQDWAYAASKESHATLVFHNLLGEIDQQYSRFLQESNVLYQHNLRRIKQFLQSRYLEKPMEIARIVARCLWEESRLLQTAATAAQQGGQANHPTAAVVTEKQQMLEQHLQDVRKRVQDLEQKMKVVENLQDDFDFNYKTLKSQGDMQDLNGNNQSVTRQKMQQLEQMLTALDQMRRSIVSELAGLLSAMEYVQKTLTDEELADWKRRQQIACIGGPPNICLDRLENWITSLAESQLQTRQQIKKLEELQQKVSYKGDPIVQHRPMLEERIVDLFRNLMKSAFVVERQPCMPMHPDRPLVIKTGVQFTTKVRLLVKFPELNYQLKIKVCIDKDSGDVAALRGSRKFNILGTNTKVMNMEESNNGSLSAEFKHLTLREQRCGNGGRANCDASLIVTEELHLITFETEVYHQGLKIDLETHSLPVVVISNICQMPNAWASILWYNMLTNNPKNVNFFTKPPIGTWDQVAEVLSWQFSSTTKRGLSIEQLTTLAEKLLGPGVNYSGCQITWAKFCKENMAGKGFSFWVWLDNIIDLVKKYILALWNEGYIMGFISKERERAILSTKPPGTFLLRFSESSKEGGVTFTWVEKDISGKTQIQSVEPYTKQQLNNMSFAEIIMGYKIMDATNILVSPLVYLYPDIPKEEAFGKYCRPESQEHPEADPGSAAPYLKTKFICVTPTTCSNTIDLPMSPRTLDSLMQFGNNGEGAEPSAGGQFESLTFDMDLTSECATSPM

SEQ ID NO: 330 - protein, 522 aa, Rat
REILNPPEKETQGEGPSLFMASTKTEAIAPASTMEDKEEDVGFQDNLFLEKALQLAKRHANALFDYAVTGDVKMLLAVQRHLTAVQDENGDSVLHLAIIHLHAQLVRDLLEVTSGSISDDIINMRNDLYQTPLHLAVITKQEDVVEDLLRVGADLSLLDRWGNSVLHLAAKEGHDKILGVLLKNSKAALLINHPNGEGLNAIHIAVMSNSLSCLQLLVAAGAEVNAQEQKSGRTALHLAVEYDNISLAGCLLLEGDALVDSTTYDGTTPLHIAAGRGSTRLAALLKAAGADPLVENFEPLYDLDDSWEKAGEDEGVVPGTTPLDMAANWQVFDILNGKPYEPVFTSDDILPQGDIKQLTEDTRLQLCKLLEIPDPDKNWATLAQKLGLGILNNAFRLSPAPSKTLMDNYEVSGGTIKELVEALRQMGYTEAIEVIQAAFRTPETTASSPVTTAQAHLLPLSSSSTRQHIDELRDNDSVCDSGVETSFRKLSFSESLTGDGPLLSLNKMPHNYGQDGPIEGKI

SEQ ID NO: 331 - protein, 327 aa, Rat; identical to SEQ ID NO: 146

SEQ ID NO: 332 - protein, 152 aa, Mouse
MANLERTFIAIKPDGVQRGLVGEIIKRFEQKGFRLVAMKFLRASEEHLKQHYIDLKDRPFFPGLVKYMNSGPVVAMVWEGLNVVKTGRVMLGETNPADSKPGTIRGDFCIQVGRNIIHGSDSVESAEKEIHLWFKPEELIDYKSCAHDWVYE

SEQ ID NO: 333 - protein, 18 aa, Rat
MANLERTFIAIKPDGVQR

SEQ ID NO: 334 - protein, 402 aa, Rat
MMVHCAGCERPILDRFLLNVLDRAWHIKCVQCCECKTNLSEKCFSREGKLYCKNDFFRRFGTKCAGCAQGISPSDLVRKARSKVFHLNCFTCMVCNKQLSTGEELYVIDENKFVCKDDYLSSSSLKEGSLNSVSSCTDRSLSPDLQDPLQDDPKETDNSTSSDKETANNENEEQNSGTKRRGPRTTIKAKQLETLKAAFAATPKPTRHIREQLAQETGLNMRVIQVWFQNRRSKERRMKQLSALGARRHAFFRSPRRMRPLGGRLDESEMLGSTPYTYYGDYQSDYYAPGGNYDFFAHGPPSQAQSPADSSFLAASGPGSTPLGALEPPLAGPHGADNPRFTDMISHPDTPSPEPGLPGALHPMPGEVFSGGPSPPFPMSGTSGYSGPLSHPNPELNEAAVW

SEQ ID NO: 335 - protein, 440 aa, Rat
MKAAVDLKPTLTIIKTEKVDLELFPSPEMECADVPLSTPSSKEMMSQALKSYFSGFTKEQQRRGIPKDPRQWTDTHVRDWVMWAVNEFSLKGVDFHKFCMSGAAVCALGKECFLELAPDFVGDILWEHLEILQKEDVKPYQVNGANPTYPESCYTSVYFISYGIEHAQCVPPSEFSEPSFITESYQTLHPISSEELLSLKYENDYPSVILRDPLQTETLQTDYFRIKQEVLTPNNMCLGRASRGKLGGQDSFESVESYDSCDRLTQSWSSQSSFNSLQRVPSYDSFDYEDYPAALPNHKPKGTFKDYVRDRADLNKDKPVIPAAALAGYTGSGPIQLWQFLLELLTDKSCQSFISWTGDCWEFKLSDPDEVARRWGKRKNKPSMNYEKLSRALRYYYDKNIIHKTAGNAYVYAFVCDLQSLLGYTPEELHAMLDVKPDAD

SEQ ID NO: 336 - protein, 760 aa, Homo sapiens; identical to SEQ ID NO: 143

SEQ ID NO: 337 - protein, 189 aa, Homo sapiens
MTEYKLVVVGAGGVGKSALTIQLIQNHFVDEYDPTIEDSYRKQVVIDGETCLLDILDTAGQEEYSAMRDQYMRTGEGFLCVFAINNSKSFADINLYREQIKRVKDSDDVPMVLVGNKCDLPTRTVDTKQAHELAKSYGIPFIETSAKTRQGVEDAFYTLVREIRQYRMKKLNSSDDGTQGCMGLPCVVM

SEQ ID NO: 338 - protein, 3056 aa, Homo sapiens [sequence omitted]

SEQ ID NO: 339 - protein, 369 aa, Rat
MLKPSLPFTSLLFLQLPLLGVGLNTTILTPNGNEDTTADFFLTTMPTDSLSVSTLPLPEVQCFVFNVEYMNCTWNSSSEPQPTNLTLHYWYKNSDNDKVQKCSHYLFSEEITSGCQLQKKEIHLYQTFVVQLQDPREPRRQATQMLKLQNLVIPWAPENLTLHKLSESQLELNWNNRFLNHCLEHLVQYRTDWDHSWTEQSVDYRHKFSLPSVDGQKRYTFRVRSRFNPLCGSAQHWSEWSHPIHWGSNTSKENPFLFALEAVVISVGSMGLIISLLCVYFWLERTMPRIPTLKNLEDLVTEYHGNFSAWSGVSKGLAESLQPDYSERLCLVSEIPPKGGALGEGPGASPCNQHSPYWAPPCYTLKPET

SEQ ID NO: 340 - protein, 303 aa, Homo sapiens
MVAPRPLRRVVLFYQGKLCSMAGNFWQSSHYLQWILDKQDLLKERQKDLKFLSEEEYWKLQIFFTNVIQALGEHLKLRQQVIATATVYFKRFYARYSLKSIDPVLMAPTCVFLASKVEEFGVVSNTRLIAAATSVLKTRFSYAFPKEFPYRMNHILECEFYLLELMDCCLIVYHPYRPLLQYVQDMGQEDMLLPLAWRIVNDTYRTDLCLLYPPFMIALACLHVACVVQQKDARQWFAELSVDMEKILEIIRVILKLYEQWKNFDERKEMATILSKMPKPKPPPNSEGEQGPNGSQNSSYSQS

SEQ ID NO: 341 - protein, 294 aa, Homo sapiens
MAMSSGGSGGGVPEQEDSVLFRRGTGQSDDSDIWDDTALIKAYDKAVASFKHALKNGDICETSGKPKTTPKRKPAKKNKSQKKNTAASLQQWKVGDKCSAIWSEDGCIYPATIASIDFKRETCVVVYTGYGNREEQNLSDLLSPICEVANNIEQNAQENENESQVSTDESENSRSPGNKSDNIKPKSAPWNSFLPPPPPMPGPRLGPGKPGLKFNGPPPPPPPPPPHLLSCWLPPFPSGPPIIPPPPPICPDSLDDADALGSMLISWYMSGYHTGYYMGFRQNQKEGRCSHSLN

SEQ ID NO: 342 - protein, 451 aa, Homo sapiens
MVSRDQAHLGPKYVGLWDFKSRTDEELSFRAGDVFHVARKEEQWWWATLLDEAGGAVAQGYVPHNYLAERETVESEPWFFGCISRSEAVRRLQAEGNATGAFLIRVSEKPSADYVLSVRDTQAVRHYKIWRRAGGRLHLNEAVSFLSLPELVNYHRAQSLSHGLRLAAPCRKHEPEPLPHWDDWERPREEFTLCRKLGSGYFGEVFEGLWKDRVQVAIKVISRDNLLHQQMLQSEIQAMKKLRHKHILALYAVVSVGDPVYIITELMAKGSLLELLRDSDEKVLPVSELLDIAWQVAEGMCYLESQNYIHRDLAARNILVGENTLCKVGDFGLARLIKEDVYLSHDHNIPYKWTAPEALSRGHYSTKSDVWSFGILLHEMFSRGQVPYPGMSNHEAFLRVDAGYRMPCPLECPPSVHKLMLTCWCRDPEQRPCFKALRERLSSFTSYENPT

SEQ ID NO: 343 - protein, 133 aa, Rat
TSTTVRGLNASTRYLFRVRASVQGLGDWSNTVEETTLGLQSASPVQESRVAEDGLDQQLVLAVVGSVSATCLTILAALLALVCIRRSCLHRRHTFTYQSGSGEETILQFSSGTLTLTRRPKPQPEPLSYPVLE

SEQ ID NO: 344 - protein, 314 aa, Homo sapiens
MFQPAGHGQDWAMEGPRDGLKKERLVDDRHDSGLDSMKDEDYEQMVKELREIRLQPQEAPLAAEPWKQQLTEDGDSFLHLAIIHEEKTLTMEVIGQVKGDLAFLNFQNNLQQTPLHLAVITNQPGIAEALLKAGCDPELRDFRGNTPLHLACEQGCLASVAVLTQTCTPQHLHSVLQATNYNGHTCLHLASIHGYLGIVEHLVTLGADVNAQEPCNGRTALHLAVDLQNPDLVSLLLKCGADVNRVTYQGYSPYQLTWGRPSTRIQQQLGQLTLENLQTLPESEDEESYDTESEFTEDELPYDDCVFGGQRLTL

SEQ ID NO: 345 - protein, 481 aa, Rat [sequence omitted]

SEQ ID NO: 346 - protein, 429 aa, Rat
MLSCTTSTMPGMICKNSDLEFDSLKPCFYPEDDDIYFGGRNSTPPGEDIWKKFELLPTPRLSPGRALAEDSLEPANWATEMLLPEADLWSNPAEEEDIFGLKGLSGSSSNPVVLQDCMWSGFSSREKPETVVSEKLPGGCGSLAVGAGTLVPGAAAATSAGHARSGTAGVGRRKAAWLTELSHLDSECVDSAVIFPANKRESMPVATIPASAGAAISLGDHQGLSSSLEDFLSNSGYVEEGGEEIYVVMLGETQFSKTVTKLPTAAHSENAALTPECAQSGELILKRSDLIQEQHNYAAPPLPYAEDARPLKKPRSQDPLGPLKCVLRPKAPRLRSRSNSDLEDIERRRNHNRMERQRRDIMRSSFLNLRDLVPELVHNEKAAKVVILKKATEYIHTLQTDESKLLVEREKLYERKQQLLEKIKQSAVC

SEQ ID NO: 347 - protein, 347 aa, Homo sapiens
MCTKMEQPFYHDDSYTATGYGRAPGGLSLHDYKLLKPSLAVNLADPYRSLKAPGARGPGPEGGGGGSYFSGQGSDTGASLKLASSELERLIVPNSNGVITTTPTPPGQYFYPRGGGSGGGAGGAGGGVTEEQEGFADGFVKALDDLHKMNHVTPPNVSLGATGGPPAGPGGVYAGPEPPPVYTNLSSYSPASASSGGAGAAVGTGSSYPTTTISYLPHAPPFAGGHPAQLGLGRGASTFKEEPQTVPEARSRDATPPVSPINMEDQERIKVERKRLRNRLAATKCRKRKLERIARLEDKVKTLKAENAGLSSTAGLLREQVAQLKQKVMTHVSNGCQLLLGVKGHAF

SEQ ID NO: 348 - protein, 347 aa, Homo sapiens
METPFYGDEALSGLGGGASGSGGTFASPGRLFPGAPPTAAAGSMMKKDALTLSLSEQVAAALKPAPAPASYPPAADGAPSAAPPDGLLASPDLGLLKLASPELERLIIQSNGLVTTTPTSSQFLYPKVAASEEQEFAEGFVKALEDLHKQNQLGAGRAAAAAAAAAGGPSGTATGSAPPGELAPAAAAPEAPVYANLSSYAGGAGGAGGAATVAFAAEPVPFPPPPPPGALGPPRLAALKDEPQTVPDVPSFGESPPLSPIDMDTQERIKAERKRLRNRIAASKCRKRKLERISRLEEKVKTLKSQNTELASTASLLREQVAQLKQKVLSHVNSGCQLLPQHQVPAY

SEQ ID NO: 349 - protein, 770 aa, Homo sapiens
MAQWNQLQQLDTRYLEQLHQLYSDSFPMELRQFLAPWIESQDWAYAASKESHATLVFHNLLGEIDQQYSRFLQESNVLYQHNLRRIKQFLQSRYLEKPMEIARIVARCLWEESRLLQTAATAAQQGGQANHPTAAVVTEKQQMLEQHLQDVRKRVQDLEQKMKVVENLQDDFDFNYKTLKSQGDMQDLNGNNQSVTRQKMQQLEQMLTALDQMRRSIVSELAGLLSAMEYVQKTLTDEELADWKRRQQIACIGGPPNICLDRLENWITSLAESQLQTRQQIKKLEELHQKVSYKGDPIVQHRPMLEERIVELFRNLMKSAFVVERQPCMPMHPDRPLVIKTGVQFTTKVRLLVKFPELNYQLKIKVCIDKDSGDVAALRGSRKFNILGTNTKVMNMEESNNGSLSAEFKHLTLREQRCGNGGRANCDASLIVTEELHLITFETEVYHQGLKIDLETHSLSVVVISNICQMPNAWASILWYNMLTNNPKNVNFFTKPPIGTWDQVAEVLSWQFSSTTKRGLSIEQLTTLAEKLLGPGVNYSGCQITWANFCKENMAGKGFSYWVWLDNIIDLVKKYILALWNEGYIMGFISKERERAILSTKPPGTFLLRFSESSKEGGVTFTWVEKDISGKTQIQSVEPYTKQQLNNMSFAEIIMGYKIMDATNILLSPLVYLYPDIPKEEAFGKYCRPESQEHPEADPGSAAPYLKTKFICVTPTTCSNTIDLPMSPRALDSLMQFGNNGEGAEPSAGGQFESLTFDMELTSECATSPM
